(19) United States
(12) Patent Application Publication
(10) Pub. No.: US 2005/0053973 A1
(43) Pub. Date: Mar. 10, 2005

(54) Novel proteins with targeted binding

(75) Inventors: Joost A. Kolkman, Palo Alto, CA (US); Willem P.C. Stemmer, Los Gatos, CA (US); Per-Ola Freskgard, Norrkoping (SE)

Correspondence Address: TOWNSEND AND TOWNSEND AND CREW, LLP, TWO EMBARCADERO CENTER, EIGHTH FLOOR, SAN FRANCISCO, CA, 94111-3834, US

(73) Assignee: Avidia Research Institute, Mountain View, CA (US)

(21) Appl. No.: 10/840,723

(22) Filed: May 5, 2004

Related U.S. Application Data
(63) Continuation-in-part of application No. 10/693,056, filed on Oct. 24, 2003.
(63) Continuation-in-part of application No. 10/693,057, filed on Oct. 24, 2003.
Application No. 10/693,057 is a continuation-in-part of application No. 10/289,660, filed on Nov. 6, 2002.
Application No. 10/289,660 is a continuation-in-part of application No. 10/133,128, filed on Apr. 26, 2002.
(60) Provisional application No. 60/374,107, filed on Apr. 18, 2002.
(60) Provisional application No. 60/333,359, filed on Nov. 26, 2001.
(60) Provisional application No. 60/337,209, filed on Nov. 19, 2001.
(60) Provisional application No. 60/286,823, filed on Apr. 26, 2001.

(51) Int. Cl. C12Q 1/68; G01N 33/53

(52) U.S. Cl. 435/6; 435/7.1

(57) ABSTRACT

Methods for identifying discrete monomer domains and immuno-domains with a desired property are provided. Methods for generating multimers from two or more selected discrete monomer domains are also provided, along with methods for identifying multimers possessing a desired property. Presentation systems are also provided which present the discrete monomer and/or immuno-domains, selected monomer and/or immuno-domains, multimers and/or selected multimers to allow their selection. Compositions, libraries and cells that express one or more library member, along with kits and integrated systems, are also included in the present invention.

### CROSS-REFERENCES TO RELATED APPLICATIONS

[0001] The present application is a continuation-in-part application of U.S. Ser. No. 10/693,056, filed Oct. 24, 2003 and a continuation-in-part of U.S. Ser. No. 10/693,057, filed Oct. 24, 2003, both of which are continuations-in-part of U.S. Ser. No. 10/289,660, filed Nov. 6, 2002, which is a continuation-in-part application of U.S. Ser. No. 10/133,128, filed Apr. 26, 2002, which claims benefit of priority to U.S. Ser. No. 60/374,107, filed Apr. 18, 2002, U.S. Ser. No. 60/333,359, filed Nov. 26, 2001, U.S. Ser. No. 60/337,209, filed Nov. 19, 2001, and U.S. Ser. No. 60/286,823, filed Apr. 26, 2001, all of which are incorporated by reference.

### BACKGROUND OF THE INVENTION

[0002] Analysis of protein sequences and three-dimensional structures have revealed that many proteins are composed of a number of discrete monomer domains. The majority of discrete monomer domain proteins is extracellular or constitutes the extracellular parts of membrane-bound proteins.

[0003] An important characteristic of a discrete monomer domain is its ability to fold independently or with some limited assistance. Limited assistance can include assistance of a chaperonin(s) (e.g., a receptor-associated protein (RAP)).The presence of a metal ion(s) also offers limited assistance. The ability to fold independently prevents misfolding of the domain when it is inserted into a new protein environment. This characteristic has allowed discrete monomer domains to be evolutionarily mobile. As a result, discrete domains have spread during evolution and now occur in otherwise unrelated proteins. Some domains, including the fibronectin type III domains and the immunoglobin-like domain, occur in numerous proteins, while other domains are only found in a limited number of proteins.

[0004] Proteins that contain these domains are involved in a variety of processes, such as cellular transporters, cholesterol movement, signal transduction and signaling functions which are involved in development and neurotransmission. See Herz, Lipoprotein receptors: beacons to neurons?, (2001) Trends in Neurosciences 24(4):193-195; Goldstein and Brown, The Cholesterol Quartet, (2001) Science 292: 1310-1312. The function of a discrete monomer domain is often specific but it also contributes to the overall activity of the protein or polypeptide. For example, the LDL-receptor class A domain (also referred to as a class A module, a complement type repeat or an A-domain) is involved in ligand binding while the gamma-carboxyglumatic acid (Gla) domain which is found in the vitamin-K-dependent blood coagulation proteins is involved in high-affinity binding to phospholipid membranes. Other discrete monomer domains include, e.g., the epidermal growth factor (EGF)-like domain in tissue-type plasminogen activator which mediates binding to liver cells and thereby regulates the clearance of this fibrinolytic enzyme from the circulation and the cytoplasmic tail of the LDL-receptor which is involved in receptor-mediated endocytosis.

[0005] Individual proteins can possess one or more discrete monomer domains. These proteins are often called mosaic proteins. For example, members of the LDL-receptor family contain four major structural domains: the cysteine rich A-domain repeats, epidermal growth factor precursor-like repeats, a transmembrane domain and a cytoplasmic domain. The LDL-receptor family includes members that: 1) are cell-surface receptors; 2) recognize extracellular ligands; and 3) internalize them for degradation by lysosomes. See Hussain et al., The Mammalian Low-Density Lipoprotein Receptor Family, (1999) Annu. Rev. Nutr. 19:141-72. For example, some members include very-low-density lipoprotein receptors (VLDL-R), apolipoprotein E receptor 2, LDLR-related protein (LRP) and megalin. Family members have the following characteristics: 1) cell-surface expression; 2) extracellular ligand binding consisting of A-domain repeats; 3) requirement of calcium for ligand binding; 4) recognition of receptor-associated protein and apolipoprotein (apo) E; 5) epidermal growth factor (EGF) precursor homology domain containing YWTD repeats (SEQ ID NO. 198); 6) single membrane-spanning region; and 7) receptor-mediated endocytosis of various ligands. See Hussain, supra. Yet, the members bind several structurally dissimilar ligands.

[0006] It is advantageous to develop methods for generating and optimizing the desired properties of these discrete monomer domains. However, the discrete monomer domains, while often being structurally conserved, are not conserved at the nucleotide or amino acid level, except for certain amino acids, e.g., the cysteine residues in the A-domain. Thus, existing nucleotide recombination methods fall short in generating and optimizing the desired properties of these discrete monomer domains.

[0007] The present invention addresses these and other problems.

### BRIEF SUMMARY OF THE INVENTION

[0008] The present invention provides methods for identifying monomers and multimers that bind to a target molecule. In some embodiments, the method comprises: providing a library of monomer domains; screening the library of monomer domains for affinity to a first target molecule; and identifying at least one monomer domain that binds to at least one target molecule. In some embodiments, the monomer domains each bind an ion

[0009] In some embodiments, the monomer comprises an amino acid sequence in which:
[0010] at least 10% of the amino acids in the sequence are cysteine; and
[0011] the amino acid sequence is at least 50 amino acids long; and/or
[0012] at least 25% of the amino acids are non-naturally-occurring amino acids.

[0013] In some embodiments, the ion is selected from calcium or zinc. In some embodiments, the monomer domain is selected from the group consisting of an A domain, EGF domain, EF Hand, Cadherin domain, C-type lectin, C2 domain, Annexin, Gla-domain, Trombospondin type 3 domain and zinc finger.

[0014] In some embodiments, the method comprises providing a library of monomer domains; screening the library of monomer domains for affinity to a first target molecule; and identifying at least one monomer domain that binds to at least one target molecule. In some embodiments, the method further comprises linking the identified monomer domains to a second monomer domain to form a library of multimers, each multimer comprising at least two monomer domains; screening the library of multimers for the ability to bind to the first target molecule; and identifying a multimer that binds to the first target molecule.

[0015] Suitable monomer domains include those that are from 25 and 500 amino acids, 100 and 150 amino acids, or 25 and 50 amino acids in length.

[0016] In some embodiments, each monomer domain of the selected multimer binds to the same target molecule. In some embodiments, the selected multimer comprises at least three monomer domains. In some embodiments, the selected multimer comprises three to ten monomer domains. In some embodiments, the selected multimer comprises four monomer domains. In some embodiments, at least three monomer domains bind to the same target molecule.

[0017] In some embodiments, the monomer domain is an LDL receptor class A domain monomer comprising the following sequence:
C₈X₃₋₁₅C_{b}X₃₋₁₅C_{c}X₆₋₇C_{d}(D,N)X₄CₑX₄₋₆DEX₂₋₈C_{f}
wherein C is cysteine, Xₙ₋ₘ represents between n and m number of independently selected amino acids, and (D,N) indicates that the position can be either D or N; and wherein Cₐ-C_{c}, C_{b}-Cₑ and C_{d}-C_{f} form disulfide bonds.

[0019] In some embodiments, the monomer domain is an LDL receptor class A domain monomer comprising the following sequence:
CaX₆₋₇C_{b}X₄₋₅C_{c}X₆C_{d}X₅CₑX₈₋₁₀C_{f}
wherein X is defined as follows: [image]
In some embodiments, the LDL receptor class A domain monomers each comprise SEQ ID NO:201.

[0022] In some embodiments, the monomer domain is an EGF domain monomer comprising the following sequence:
CₐX₃₋₄C_{b}X₃₋₇C_{c}X₄₋₆C_{d}X₁₋₂CₑX₈₋₂₃C_{f}
wherein C is cysteine, Xₙ₋ₘ represents between n and m number of independently selected amino acids; and wherein Cₐ-C_{c}, C_{b}-Cₑ and C_{d}-C_{f} form disulfide bonds.

[0024] In some embodiments, the monomer domain is an EGF domain monomer comprising the following sequence:
CₐX₄₋₆C_{b}X₃₋₅C_{c}X₈₋₉C_{d}X₁CₑX₈₋₁₂C_{f}
wherein X is defined as follows:

[image]

[0026] In some embodiments, the method further comprises screening the library of monomer domains for affinity to a second target molecule; identifying a monomer domain that binds to a second target molecule; linking at least one monomer domain with affinity for the first target molecule with at least one monomer domain with affinity for the second target molecule, thereby forming a multimer with affinity for the first and the second target molecule.

[0027] In some embodiments, the methods comprise identifying a multimer with an improved avidity for the target compared to the avidity of a monomer domain alone for the same target molecule. In some embodiments, the avidity of the multimer is at least two times the avidity of a monomer domain alone.

[0028] In some embodiments, the screening of the library of monomer domains and the identifying of monomer domains occurs simultaneously. In some embodiments, the screening of the library of multimers and the identifying of multimers occurs simultaneously.

[0029] In some embodiments, the polypeptide domain is selected from the group consisting of an EGF-like domain, a Kringle-domain, a fibronectin type I domain, a fibronectin type II domain, a fibronectin type III domain, a PAN domain, a Gla domain, a SRCR domain, a Kunitz/Bovine pancreatic trypsin Inhibitor domain, a Kazal-type serine protease inhibitor domain, a Trefoil (P-type) domain, a von Willebrand factor type C domain, an Anaphylatoxin-like domain, a CUB domain, a thyroglobulin type I repeat, LDL-receptor class A domain, a Sushi domain, a Link domain, a Thrombospondin type I domain, an Immunoglobulin-like domain, a C-type lectin domain, a MAM domain, a von Willebrand factor type A domain, a Somatomedin B domain, a WAP-type four disulfide core domain, a F5/8 type C domain, a Hemopexin domain, an SH2 domain, an SH3 domain, a Laminin-type EGF-like domain, and a C2 domain

[0030] In some embodiments, the methods comprise a further step of mutating at least one monomer domain, thereby providing a library comprising mutated monomer domains. In some embodiments, the mutating step comprises recombining a plurality of polynucleotide fragments of at least one polynucleotide encoding a monomer domain. In some embodiments, the mutating step comprises directed evolution. In some embodiments the mutating step comprises combining different loop sequences. In some embodiments, the mutating step comprises site-directed mutagenesis. In some embodiments, the mutating step comprises site-directed recombination to create crossovers that result in the generation of sequences that are identical to human sequences.

[0031] In some embodiments, the methods further comprise: screening the library of monomer domains for affinity to a second target molecule; identifying a monomer domain that binds to a second target molecule; linking at least one monomer domain with affinity for the first target molecule with at least one monomer domain with affinity for the second target molecule, thereby forming a library of multimers; screening the library of multimers for the ability to bind to the first and second target molecule; and identifying a multimer that binds to the first and second target molecule, thereby identifying a multimer that specifically binds a first and a second target molecule.

[0032] The present invention also provides methods of producing a polypeptide comprising the monomer domains and multimers identified according to the methods described above. In some embodiments, the monomer domains or multimers are produced by recombinant gene expression.

[0033] Certain methods of the present invention further comprise: providing a second library of monomer domains; screening the second library of monomer domains for affinity to at least a second target molecule; identifying a second monomer domain that binds to the second target molecule; linking the identified monomer domains that bind to the first target molecule or the second target molecule, thereby forming a library of multimers; screening the library of multimers for the ability to bind to the first and second target molecule; and identifying a multimer that binds to the first and second target molecules.

[0034] In some embodiments, the target molecule is selected from the group consisting of a viral antigen, a bacterial antigen, a fungal antigen, an enzyme, a cell surface protein, an enzyme inhibitor, a reporter molecule, a serum protein, and a receptor. In some embodiments, the viral antigen is a polypeptide required for viral replication. In some embodiments, the first and at least second target molecules are different components of the same viral replication system. In some embodiments, the selected multimer binds to at least two serotypes of the same virus.

[0035] In some embodiments, the library of monomer domains is expressed as a phage display, ribosome display, polysome display, or cell surface display. In some embodiments, the library of monomer domains is presented on a microarray.

[0036] In some embodiments, the monomer domains are linked by a polypeptide linker. In some embodiments, the polypeptide linker is a linker naturally-associated with the monomer domain. In some embodiments, the polypeptide linker is a variant of a linker naturally-associated with the monomer domain. In some embodiments, the linking step comprises linking the monomer domains with a variety of linkers of different lengths and composition.

[0037] In some embodiments, the domains form a secondary structure by the formation of disulfide bonds. In some embodiments, the multimers comprise an A domain connected to a monomer domain by a polypeptide linker. In some embodiments, the linker is from 1-20 amino acids inclusive. In some embodiments, the linker is made up of 5-7 amino acids. In some embodiments, the linker is 6 amino acids in length. In some embodiments, the linker comprises the following sequence, A₁A₂A₃A₄A₅A₆ (SEQ ID NO. 244), wherein A₁ is selected from the amino acids A, P, T, Q, E and K; A₂ and A₃ are any amino acid except C, F, Y, W, or M; A₄ is selected from the amino acids S, G and R; A₅ is selected from the amino acids H, P, and R; A₆ is the amino acid, T. In some embodiments, the linker comprises a naturally-occurring sequence between the C-terminal cysteine of a first A domain and the N-terminal cysteine of a second A domain.

[0038] In some embodiments, the multimers comprise a C2 domain connected to a monomer domain by a polypeptide linker. In some embodiments, each C2 monomer domain differs from the corresponding wild-type C2 monomer domain in that at least one amino acid residue constituting part of the loop regions has been substituted with another amino acid residue; at least one amino acid residue constituting part of the loop regions has been deleted and/or at least one amino acid residue has been inserted in at least one of the loop regions. In some embodiments, the C2 domain comprises loop regions 1, 2, and 3 and the amino acid sequences outside of the loop regions 1, 2 and 3 are identical for all C2 monomer domains present in the polypeptide multimer. In some of these embodiments, the linker is between 1-20 amino acid residues in length. In some embodiments, the linker is between 10-12 amino acid residues in length. In some embodiments, the linker is 11 amino acid residues in length.

[0039] The present invention also provides polypeptides comprising the multimers or monomer domains selected as described above.

[0040] The present invention also provides polynucleotides encoding the multimers or monomer domains selected as described above.

[0041] The present invention also provides libraries of multimers or monomer domains formed as described above.

[0042] The present invention also provides methods for identifying a multimer that binds to at least one target molecule, comprising the steps of: providing a library of multimers, wherein each multimer comprises at least two monomer domains and wherein each monomer domain exhibits a binding specificity for a target molecule; and screening the library of multimers for target molecule-binding multimers. In some embodiments, the methods further comprise identifying target molecule-binding multimers having an avidity for the target molecule that is greater than the avidity of a single monomer domain for the target molecule. In some embodiments, one or more of the multimers comprises a monomer domain that specifically binds to a second target molecule.

[0043] Alternative methods for identifying a multimer that binds to a target molecule include methods comprising providing a library of monomer domains and/or immuno domains; screening the library of monomer domains and/or immuno domain for affinity to a first target molecule; identifying at least one monomer domain and/or immuno domain that binds to at least one target molecule; linking the identified monomer domain and/or immuno domain to a library of monomer domains and/or immuno domains to form a library of multimers, each multimer comprising at least two monomer domains, immuno domains or combinations thereof; screening the library of multimers for the ability to bind to the first target molecule; and identifying a multimer that binds to the first target molecule.

[0044] In some embodiments, the monomer domains each bind an ion. In some embodiments, the ion is selected from the group consisting of calcium and zinc. In some embodiments, the monomer domains are selected from the group consisting of an A domain, EGF domain, EF Hand, Cadherin domain, C-type lectin, C2 domain, Annexin, Gla-domain, Trombospondin type 3 domain and zinc finger.

[0045] The present invention also provides libraries of multimers. In some embodiments, each multimer comprises at least two monomer domains connected by a linker; each monomer domain exhibits a binding specificity for a target molecule; and each monomer domain is a non-naturally occurring monomer domain. In some embodiments, each multimer comprises at least two monomer domains connected by a linker; and each monomer domain binds an ion.

[0046] In some embodiments, the ion is selected from calcium and zinc. In some embodiments, the polypeptide domains are selected from the group consisting of consisting of an A domain, EGF domain, EF Hand, Cadherin domain, C-type lectin, C2 domain, Annexin, Gla-domain, Trombospondin type 3 domain and zinc finger.

[0047] In some embodiments, the linker comprises at least 3 amino acid residues. In some embodiments, the linker comprises at least 6 amino acid residues. In some embodiments, the linker comprises at least 10 amino acid residues.

[0048] The present invention also provides polypeptides comprising at least two monomer domains separated by a heterologous linker sequence. In some embodiments, each monomer domain specifically binds to a target molecule; and each monomer domain is a non-naturally occurring protein monomer domain. In some embodiments, each monomer domain binds an ion.

[0049] In some embodiments, the ion is selected from calcium and zinc. In some embodiments, the monomer domain is selected from the group consisting of an A domain, EGF domain, EF Hand, Cadherin domain, C-type lectin, C2 domain, Annexin, Gla-domain, Trombospondin type 3 domain and zinc finger.

[0050] In some embodiments, polypeptides comprise a first monomer domain that binds a first target molecule and a second monomer domain that binds a second target molecule. In some embodiments, the polypeptides comprise two monomer domains, each monomer domain having a binding specificity that is specific for a different site on the same target molecule. In some embodiments, the polypeptides further comprise a monomer domain having a binding specificity for asecond target molecule.

[0051] In some embodiments, the monomer domain is an LDL receptor class A domain monomer comprising the following sequence:
CₐX₃₋₁₅C_{b}X₃₋₁₅C_{c}X₆₋₇C_{d}(D,N)X₄₋₆DEX₄₋₆DEX₂₋₈C_{f}
wherein C is cysteine, Xₙ₋ₘ represents between n and m number of independently selected amino acids, and (D,N) indicates that the position can be either D or N; and wherein Cₐ-C_{c}, C_{b}-Cₑ and C_{d}-C_{f} form disulfide bonds.

[0053] In some embodiments, the monomer domain is an LDL receptor class A domain monomer comprising the following sequence:
CₐX₆₋₇C_{b}X₄₋₅C_{c}X₆C_{d}X₅CₑX₈₋₁₀C_{f}
wherein X is defined as follows: [image]
In some embodiments, the LDL receptor class A domain monomers each comprise SEQ ID NO:201.

[0056] In some embodiments, the monomer domain is an EGF domain monomer comprising the following sequence:
CaX₃₋₁₄C_{b}X₃₋₇C_{c}X₄₋₁₆C_{d}X₁₋₂CₑX₈₋₂₃C_{f}
wherein C is cysteine, Xₙ₋ₘ represents between n and m number of independently selected amino acids; and wherein Cₐ-C_{c}, C_{b}-Cₑ and C_{d}-C_{f} form disulfide bonds.

[0058] In some embodiments, the monomer domain is an EGF domain monomer comprising the following sequence:
CₐX₄₋₆C_{b}X₃₋₅C_{c}X₈₋₉C_{d}X₁CₑX₈₋₁₂C_{f}
wherein X is defined as follows:

[image]

[0060] In some embodiments, the monomer domains of a library, multimer or polypeptide are typically about 40% identical to each other, usually about 50% identical, sometimes about 60% identical, and frequently at least 70% identical.

[0061] The invention also provides polynucleotides encoding the above-described polypeptides.

[0062] The present invention also provides multimers of immuno-domains having binding specificity for a target molecule, as well as methods for generating and screening libraries of such multimers for binding to a desired target molecule. More specifically, the present invention provides a method for identifying a multimer that binds to a target molecule, the method comprising, providing a library of immuno-domains; screening the library of immuno-domains for affinity to a first target molecule; identifying one or more (e.g., two or more) immuno-domains that bind to at least one target molecule; linking the identified monomer domain to form a library of multimers, each multimer comprising at least three immuno-domains (e.g., four or more, five or more, six or more, etc.); screening the library of multimers for the ability to bind to the first target molecule; and identifying a multimer that binds to the first target molecule. Libraries of multimers of at least two immuno-domains that are minibodies, single domain antibodies, Fabs, or combinations thereof are also employed in the practice of the present invention. Such libraries can be readily screened for multimers that bind to desired target molecules in accordance with the invention methods described herein.

[0063] The present invention further provides methods of identifying hetero-immuno multimers that binds to a target molecule. In some embodiments, the methods comprise, providing a library of immuno-domains; screening the library of immuno-domains for affinity to a first target molecule; providing a library of monomer domains; screening the library of monomer domains for affinity to a first target molecule; identifying at least one immuno-domain that binds to at least one target molecule; identifying at least one monomer domain that binds to at least one target molecule; linking the identified immuno-domain with the identified monomer domains to form a library of multimers, each multimer comprising at least two domains; screening the library of multimers for the ability to bind to the first target molecule; and identifying a multimer that binds to the first target molecule.

[0064] The present invention also provides methods for identifying an LDL-receptor class A monomer domain that binds to a target molecule. In some embodiments, the method comprises providing a library of LDL-receptor class A monomer domains; screening the library of LDL-receptor class A monomer domains for affinity to a target molecule; and identifying an LDL-receptor class A monomer domain that binds to the target molecule.

[0065] In some embodiments, the method comprises linking each member of a library of LDL-receptor class A monomers to the identified monomer domain to form a library of multimers; screening the library of multimers for affinity to the target molecule; and identifying a multimer that binds to the target. In some embodiments, the multimer binds to the target with greater affinity than the monomer. In some embodiments, the method further comprises expressing the library using a display format selected from the group consisting of a phage display, a ribosome display, a polysome display, or a cell surface display.

[0066] In some embodiments, the method further comprises a step of mutating at least one monomer domain, thereby providing a library comprising mutated LDL-receptor class A monomer domains. In some embodiments, the mutating step comprises directed evolution. In some embodiments, the mutating step comprises site-directed mutagenesis.

[0067] The present invention also provides method of producing a polypeptide comprising the multimer identified in a method comprising providing a library of LDL-receptor class A monomer domains; screening the library of LDL-receptor class A monomer domains for affinity to a target molecule; and identifying an LDL-receptor class A monomer domain that binds to the target molecule. In some embodiments, the multimer is produced by recombinant gene expression.

[0068] The present invention also provides methods for generating a library of chimeric LDL receptor A-domain monomers derived from human LDL receptor A-domains. In some embodiments, the methods comprise providing loop sequences corresponding to at least one loop from each of two different naturally occurring variants of a human LDL receptor A-domains, wherein the loop sequences are polynucleotide or polypeptide sequences; covalently combining loop sequences to generate a library of chimeric monomer domain sequences, each chimeric sequence encoding a chimeric LDL receptor A-domain monomer having at least two loops; expressing the library of chimeric LDL receptor A-domain monomers using a display format selected from the group consisting of phage display, ribosome display, polysome display, and cell surface display; screening the expressed library of chimeric LDL receptor A-domain monomers for binding to a target molecule; and identifying a chimeric LDL receptor A-domain monomer that binds to the target molecule.

[0069] In some embodiments, the methods further comprise linking the identified chimeric LDL receptor A-domain monomer domain to each member of the library of chimeric LDL receptor A-domain monomers to form a library of multimers; screening the library of multimers for the ability to bind to the first target molecule with an increased affinity; and identifying a multimer of chimeric LDL receptor A-domain monomers that binds to the first target molecule with an increased affinity.

[0070] The present invention also provides methods of making chimeric LDL receptor A-domain monomer identified in a method comprising providing loop sequences corresponding to at least one loop from each of two different naturally occurring variants of a human LDL receptor A-domains, wherein the loop sequences are polynucleotide or polypeptide sequences; covalently combining loop sequences to generate a library of chimeric monomer domain sequences, each chimeric sequence encoding a chimeric LDL receptor A-domain monomer having at least two loops; expressing the library of chimeric LDL receptor A-domain monomers using a display format selected from the group consisting of phage display, ribosome display, polysome display, and cell surface display; screening the expressed library of chimeric LDL receptor A-domain monomers for binding to a target molecule; and identifying a chimeric LDL receptor A-domain monomer that binds to the target molecule. In some embodiments, the chimeric LDL receptor A-domain monomer is produced by recombinant gene expression.

[0071] The present invention also provides non-naturally-occurring polypeptides comprising an LDL receptor class A domain monomer, wherein the monomer comprises the following sequence:
CₐX₃₋₁₅C_{b}X₃₋₁₅C_{c}X₆₋₇C_{d}(D,N)X₄CₑX₄₋₆DEX₂₋₈C_{f}
wherein C is cysteine, Xₙ₋ₘ represents between n and m number of independently selected amino acids, and (D,N) indicates that the position can be either D or N; and wherein Cₐ-C_{c}, C_{b}-Cₑ and C_{d}-C_{f} form disulfide bonds.

[0073] In some embodiments, the monomer domain is an LDL receptor class A domain monomer comprising the following sequence:
CaX₆₋₇C_{b}X₄₋₅C_{c}X₆C_{d}X₅CₑX₈₋₁₀C_{f}
wherein X is defined as follows:

[image]

[0075] In some embodiments, the polypeptide is 65 or fewer amino acids long. In some embodiments, the monomer is fused to a heterologous amino acid sequence. In some embodiments, the monomer binds to a target molecule. In some embodiments, the heterologous amino acid sequence is selected from an affinity peptide, a heterologous LDL receptor class A domain, a heterologous EGF domain, and a purification tag

[0076] The present invention also provides non-naturally-occurring polypeptides comprising an EGF domain monomer, wherein the EGF domain monomer comprises the following sequence:
CₐX₃₋₁₄C_{b}X₃₋₇C_{c}X₄₋₁₆C_{d}X₁₋₂CₑX₈₋₂₃C_{f}
wherein C is cysteine, Xₙ₋ₘ represents between n and m number of independently selected amino acids; and
[0078] wherein Cₐ-C_{c}, C_{b}-Cₑ and C_{d}-C_{f} form disulfide bonds.

[0079] In some embodiments, the monomer domain is an EGF domain monomer comprising the following sequence:
CₐX₄₋₆C_{b}X₃₋₅C_{c}X₈₋₉C_{d}X₁CₑX₈₋₁₂C_{f}
wherein X is defined as follows:

[image]

[0081] In some embodiments, the EGF domain monomer is fused to a heterologous amino acid sequence. In some embodiments, the monomer binds to a target molecule. In some embodiments, the polypeptide is 45 or fewer amino acids long. In some embodiments, the heterologous amino acid sequence is selected from an affinity peptide (e.g., SKVILF), a heterologous LDL receptor class A domain, a heterologous EGF domain, a purification tag, an enzyme (e.g., horseradish peroxidase or alkaline phosphatase), and a reporter protein (e.g., green fluorescent protein or luciferase).

[0082] The present invention provides methods for screening a library of monomer domains or multimers comprising monomer domains for binding affinity to multiple ligands. In some embodiments, the method comprises contacting a library of monomer domains or multimers of monomer domains to multiple ligands; and selecting monomer domains or multimers that bind to at least one of the ligands.

[0083] In some embodiments, the methods comprise (i.) contacting a library of monomer domains to multiple ligands; (ii.) selecting monomer domains that bind to at least one of the ligands; (iii.) linking the selected monomer domains to a library of monomer domains to form a library of multimers, each comprising a selected monomer domain and a second monomer domain; (iv.) contacting the library of multimers to the multiple ligands to form a plurality of complexes, each complex comprising a multimer and a ligand; and (v.) selecting at least one complex.

[0084] In some embodiments, the method further comprises linking the multimers of the selected complexes to a library of monomer domains or multimers to form a second library of multimers, each comprising a selected multimer and at least a third monomer domain; contacting the second library of multimers to the multiple ligands to form a plurality of second complexes; and selecting at least one second complex.

[0085] In some embodiments, the identity of the ligand and the multimer is determined. In some embodiments, a library of monomer domains is contacted to multiple ligands. In some embodiments, a library of multimers is contacted to multiple ligands.

[0086] In some embodiments, the multiple ligands are in a mixture. In some embodiments, the multiple ligands are in an array. In some embodiments, the multiple ligands are in or on a cell or tissue. In some embodiments, the multiple ligands are immobilized on a solid support.

[0087] In some embodiments, the ligands are polypeptides. In some embodiments, the polypeptides are expressed on the surface of phage. In some embodiments, the monomer domain or multimer library is expressed on the surface of phage.

[0088] In some embodiments, the monomer domain is a LDL receptor type A monomer domain. In some embodiments, the monomer domain is an EGF monomer domain.

[0089] In some embodiments, the library of multimers is expressed on the surface of phage to form library-expressing phage and the ligands are expressed on the surface of phage to form ligand-expressing phage, and the method comprises contacting library-expressing phage to the ligand-expressing phage to form ligand-expressing phage/library-expressing phage pairs; removing ligand-expressing phage that do not bind to library-expressing or removing library-expressing phage that do not bind to ligand-expressing phage; and selecting the ligand-expressing phage/library-expressing phage pairs. In some embodiments, the methods further comprise isolating polynucleotides from the phage pairs and amplifying the polynucleotides to produce a polynucleotide hybrid comprising polynucleotides from the ligand-expressing phage and the library-expressing phage.

[0090] In some embodiments, the methods comprise isolating polynucleotide hybrids from a plurality of phage pairs, thereby forming a mixture of polynucleotide hybrids. In some embodiments, the methods comprise contacting the mixture of hybrid polynucleotides to a cDNA library under conditions to allow for polynucleotide hybridization, thereby hybridizing a hybrid polynucleotide to a cDNA in the cDNA library; and determining the nucleotide sequence of the hybridized hybrid polynucleotide, thereby identifying a monomer domain that specifically binds to the polypeptide encoded by the cDNA. In some embodiments, the monomer domain library is expressed on the surface of phage to form library-expressing phage and the ligands are expressed on the surface of phage to form ligand-expressing phage, and the selected complexes comprise a library-expressing phage bound to a ligand-expressing phage and the method comprises: dividing the selected monomer domains or multimers into a first and a second portion, linking the monomer domains or multimers of the first portion to a solid surface and contacting a phage-displayed ligand library to the monomer domains or multimers of the first portion to identify target ligand phage that binds to a monomer domain or multimer of the first portion; infecting phage displaying the monomer domains or multimers of the second portion into bacteria to express the phage; and contacting the target ligand phage to the expressed phage to form phage pairs comprised of a target ligand phage and a phage displaying a monomer domain or multimer.

[0091] In some embodiments, the methods further comprise isolating a polynucleotide from each phage of the phage pair, thereby identifying a multimer or monomer domain that binds to the ligand in the phage pair. In some embodiments, the methods further comprise amplifying the polynucleotides to produce a polynucleotide hybrid comprising polynucleotides from the target ligand phage and the library phage.

[0092] In some embodiments, the methods comprise isolating and amplifying polynucleotide hybrids from a plurality of phage pairs, thereby forming a mixture of polynucleotide hybrids. In some embodiments, the methods comprise contacting the mixture of hybrid polynucleotides to a cDNA library under conditions to allow for hybridization, thereby hybridizing a hybrid polynucleotide to a cDNA in the cDNA library; and determining the nucleotide sequence of the associated hybrid polynucleotide, thereby identifying a monomer domain that specifically binds to the ligand encoded by the cDNA associated cDNA.

[0093] The present invention also provides non-naturally-occurring polypeptides comprising an amino acid sequence in which:
[0094] at least 1%, 2%, 3%, 4%, 5%, 6%, 7%, 8%, 9%, 10%, 11%, 12%, 13%, 14%, 15%, 16%, 17%, 18%, 19%, 20% or more of the amino acids in the sequence are cysteine; and
[0095] the amino acid sequence is at least 10, 20, 30, 45, 50, 55, 60, 70, 80, 90, 100 or more amino acids long; and/or
[0096] at least 5%, 10%, 15%, 20%, 25%, 30%, 35%, 40%, 45%, 50% or more of the amino acids are non-naturally-occurring amino acids. For example, in some embodiments, the amino acid sequence comprises at least 10% cysteines and the amino acid sequence is at least 50 amino acids long or at least 25% of the amino acids are non-naturally occurring. In some embodiments, the amino acid sequence is a non-naturally occurring A domain.

[0097] In some embodiments, the polypeptides of the invention comprise one, two, three, four, or more monomers with at least 10%, 15%, 20%, 25%, 30%, 35%, 40%, 45%, 50% or more non-naturally-occurring amino acids. In some embodiments, the one or more monomer domains comprises at least 10%, 15%, 20%, 25%, 30%, 35%, 40%, 45%, 50% or more amino acids that do not occur at that position in natural human proteins. In some embodiments, the monomer domains are derived from a naturally-occurring human protein sequence. In some embodiments, the polypeptides of the invention also have a serum half-life of at least, e.g., 1, 2, 3, 4, 5, 10, 20, 30, 40, 50, 60, 70 80, 90, 100, 150, 200, 250, 400, 500 or more hours.

[0098] Unless otherwise indicated, the following definitions supplant those in the art.

[0099] The term “monomer domain” or “monomer” is used interchangeably herein refer to a discrete region found in a protein or polypeptide. A monomer domain forms a native three-dimensional structure in solution in the absence of flanking native amino acid sequences. Monomer domains of the invention will specifically bind to a target molecule. For example, a polypeptide that forms a three-dimensional structure that binds to a target molecule is a monomer domain. As used herein, the term “monomer domain” does not encompass the complementarity determining region (CDR) of an antibody.

[0100] The term “monomer domain variant” refers to a domain resulting from human-manipulation of a monomer domain sequence. Examples of man-manipulated changes include, e.g., random mutagenesis, site-specific mutagenesis, recombining, directed evolution, oligo-directed forced crossover events, direct gene synthesis incorporation of mutation, etc. The term “monomer domain variant” does not embrace a mutagenized complementarity determining region (CDR) of an antibody.

[0101] The term “loop” refers to that portion of a monomer domain that is typically exposed to the environment by the assembly of the scaffold structure of the monomer domain protein, and which is involved in target binding. The present invention provides three types of loops that are identified by specific features, such as, potential for disulfide bonding, bridging between secondary protein structures, and molecular dynamics (i.e., flexibility). The three types of loop sequences are a cysteine-defined loop sequence, a structure-defined loop sequence, and a B-factor-defined loop sequence.

[0102] As used herein, the term “cysteine-defined loop sequence” refers to a subsequence of a naturally occurring monomer domain-encoding sequence that is bound at each end by a cysteine residue that is conserved with respect to at least one other naturally occurring monomer domain of the same family. Cysteine-defined loop sequences are identified by multiple sequence alignment of the naturally occurring monomer domains, followed by sequence analysis to identify conserved cysteine residues. The sequence between each consecutive pair of conserved cysteine residues is a cysteine-defined loop sequence. The cysteine-defined loop sequence does not include the cysteine residues adjacent to each terminus. Monomer domains having cysteine-defined loop sequences include the LDL receptor A-domains, EGF-like domains, sushi domains, Fibronectin type 1 domains, and the like. Thus, for example, in the case of LDL receptor A-domains represented by the consensus sequence, CX₆CX₄CX₆CX₅CX₈C (see also FIG. 9), wherein X₆, X₄, X₅, and X₈ each represent a cysteine-defined loop sequence.

[0103] As used herein, the term “structure-defined loop sequence” refers to a subsequence of a monomer-domain encoding sequence that is bound at each end to subsequences that each form a secondary structure. Secondary structures for proteins with known three dimensional structures are identified in accordance with the algorithm STRIDE for assigning protein secondary structure as described in Frishman, D. and Argos, P. (1995) “Knowledge-based secondary structure assignment,” Proteins, 23(4):566-79 (see also //hgmp.mrc.ac.uk/Registered/Option/stride.html at the World Wide Web). Secondary structures for proteins with unknown or uncharacterized three dimensional structures are identified in accordance with the algorithm described in Jones, D. T. (1999), “Protein secondary structure prediction based on position-specific scoring matrices,” J. Mol. Biol., 292:195-202 (see also McGuffin, L. J., Bryson, K., Jones, D. T. (2000) “The PSIPRED protein structure prediction server,” Bioinformatics, 16:404-405, and //bioinf.cs.ucl.ac.uk/psipred/ at the World Wide Web). Secondary structures include, for example, pleated sheets, helices, and the like. Examples of monomer domains having structure-defined loop sequences are the C2 domains, Ig domains, Factor ⅝ C domains, Fibronectin type 3 domains, and the like.

[0104] The term “B-factor-defined loop sequence” refers to a subsequence of at least three amino acid residues of a monomer-domain encoding sequence in which the B-factors for the alpha carbons in the B-factor-defined loop are among the 25% highest alpha carbon B factors in the entire monomer domain. Typically the average alpha-carbon B-factor for the subsequence is at least about 65. As used herein, the term “B-factor” (or “temperature factor” or “Debye-Waller factor”) is derived from X-ray scattering data. The B-factor is a factor that can be applied to the X-ray scattering term for each atom, or for groups of atoms, that describes the degree to which electron density is spread out B-factors employed in the practice of the present invention may be either isotropic or anisotropic. The term “average alpha-carbon B-factor” refers to:

$$( {\sum }_{i = 1}^{n} B \text{-} {factor}_{C α i} ) / n$$

where n corresponds to the number of residues in the loop, and is at least 3, and B-factor_{Cαi} is the B-factor for the alpha carbon of amino acid residue i of the loop.

[0106] The term “multimer” is used herein to indicate a polypeptide comprising at least two monomer domains and/or immuno-domains (e.g., at least two monomer domains, at least two immuno-domains, or at least one monomer domain and at least one immuno-domain). The separate monomer domains and/or immuno-domains in a multimer can be joined together by a linker. A multimer is also known as a combinatorial mosaic protein or a recombinant mosaic protein.

[0107] The term “family” and “family class” are used interchangeably to indicate proteins that are grouped together based on similarities in their amino acid sequences. These similar sequences are generally conserved because they are important for the function of the protein and/or the maintenance of the three dimensional structure of the protein. Examples of such families include the LDL Receptor A-domain family, the EGF-like family, and the like.

[0108] The term “ligand,” also referred to herein as a “target molecule,” encompasses a wide variety of substances and molecules, which range from simple molecules to complex targets. Target molecules can be proteins, nucleic acids, lipids, carbohydrates or any other molecule capable of recognition by a polypeptide domain. For example, a target molecule can include a chemical compound (i.e., non-biological compound such as, e.g., an organic molecule, an inorganic molecule, or a molecule having both organic and inorganic atoms, but excluding polynucleotides and proteins), a mixture of chemical compounds, an array of spatially localized compounds, a biological macromolecule, a bacteriophage peptide display library, a polysome peptide display library, an extract made from a biological materials such as bacteria, plants, fungi, or animal (e.g., mammalian) cells or tissue, a protein, a toxin, a peptide hormone, a cell, a virus, or the like. Other target molecules include, e.g., a whole cell, a whole tissue, a mixture of related or unrelated proteins, a mixture of viruses or bacterial strains or the like. Target molecules can also be defined by inclusion in screening assays described herein or by enhancing or inhibiting a specific protein interaction (i.e., an agent that selectively inhibits a binding interaction between two predetermined polypeptides).

[0109] As used herein, the term “immuno-domains” refers to protein binding domains that contain at least one complementarity determining region (CDR) of an antibody. Immuno-domains can be naturally occurring immunological domains (i.e. isolated from nature) or can be non-naturally occurring immunological domains that have been altered by human-manipulation (e.g., via mutagenesis methods, such as, for example, random mutagenesis, site-specific mutagenesis, recombination, and the like, as well as by directed evolution methods, such as, for example, recursive error-prone PCR, recursive recombination, and the like.). Different types of immuno-domains that are suitable for use in the practice of the present invention include a minibody, a single-domain antibody, a single chain variable fragment (ScFv), and a Fab fragment.

[0110] The term “minibody” refers herein to a polypeptide that encodes only 2 complementarity determining regions (CDRs) of a naturally or non-naturally (e.g., mutagenized) occurring heavy chain variable domain or light chain variable domain, or combination thereof. An example of a minibody is described by Pessi et al., A designed metal-binding protein with a novel fold, (1993) Nature 362:367-369. A multimer of minibodies is schematically illustrated in FIG. 11A. The circles depict minibodies, and the solid lines depict the linker moieties joining the immuno-domains to each other.

[0111] As used herein, the term “single-domain antibody” refers to the heavy chain variable domain (“V_{H}”) of an antibody, i.e., a heavy chain variable domain without a light chain variable domain. Exemplary single-domain antibodies employed in the practice of the present invention include, for example, the Camelid heavy chain variable domain (about 118 to 136 amino acid residues) as described in Hamers-Casterman, C. et al., Naturally occurring antibodies devoid of light chains (1993) Nature 363:446-448, and Dumoulin, et al., Single-domain antibody fragments with high conformational stability (2002) Protein Science 11:500-515. A multimer of single-domain antibodies is depicted in FIG. 11B. The ellipses represent the single-domain antibodies, and the solid lines depict the linker moieties joining the single-domain antibodies to each other.

[0112] The terms “single chain variable fragment” or “ScFv” are used interchangeably herein to refer to antibody heavy and light chain variable domains that are joined by a peptide linker having at least 12 amino acid residues. Single chain variable fragments contemplated for use in the practice of the present invention include those described in Bird, et al., Single-chain antigen-binding proteins (1988) Science 242(4877):423-426 and Huston et al., Protein engineering of antibody binding sites: recovery of specific activity in an anti-digoxin single-chain Fv analogue produced in Escherichia coli (1988) Proc Natl Acad Sci U S A 85(16):5879-83. A multimer of single chain variable fragments is illustrated in FIG. 1C. The dotted lines represent the peptide linker joining the heavy and light chain variable domains to each other. The solid lines depict the linker moieties joining the heavy chain variable domains to each other.

[0113] As used herein, the term “Fab fragment” refers to an immuno-domain that has two protein chains, one of which is a light chain consisting of two light chain domains (V_{L} variable domain and C_{L} constant domain) and a heavy chain consisting of two heavy domains (i.e., a V_{H} variable and a C_{H} constant domain). Fab fragments employed in the practice of the present invention include those that have an interchain disulfide bond at the C-terminus of each heavy and light component, as well as those that do not have such a C-terminal disulfide bond. Each fragment is about 47 kD. Fab fragments are described by Pluckthun and Skerra, Expression of functional antibody Fv and Fab fragments in Escherichia col (1989) Methods Enzymol 178:497-515. A multimer of Fab fragments is depicted in FIG. 11D. The white ellipses represent the heavy chain component of the Fab fragment, the filled ellipses represent the light chain component of the Fab.

[0114] The term “linker” is used herein to indicate a moiety or group of moieties that joins or connects two or more discrete separate monomer domains. The linker allows the discrete separate monomer domains to remain separate when joined together in a multimer. The linker moiety is typically a substantially linear moiety. Suitable linkers include polypeptides, polynucleic acids, peptide nucleic acids and the like. Suitable linkers also include optionally substituted alkylene moieties that have one or more oxygen atoms incorporated in the carbon backbone. Typically, the molecular weight of the linker is less than about 2000 daltons. More typically, the molecular weight of the linker is less than about 1500 daltons and usually is less than about 1000 daltons. The linker can be small enough to allow the discrete separate monomer domains to cooperate, e.g., where each of the discrete separate monomer domains in a multimer binds to the same target molecule via separate binding sites. Exemplary linkers include a polynucleotide encoding a polypeptide, or a polypeptide of amino acids or other non-naturally occurring moieties. The linker can be a portion of a native sequence, a variant thereof, or a synthetic sequence. Linkers can comprise, e.g., naturally occurring, non-naturally occurring amino acids, or a combination of both.

[0115] The term “separate” is used herein to indicate a property of a moiety that is independent and remains independent even when complexed with other moieties, including for example, other monomer domains. A monomer domain is a separate domain in a protein because it has an independent property that can be recognized and separated from the protein. For instance, the ligand binding ability of the A-domain in the LDLR is an independent property. Other examples of separate include the separate monomer domains in a multimer that remain separate independent domains even when complexed or joined together in the multimer by a linker. Another example of a separate property is the separate binding sites in a multimer for a ligand.

[0116] As used herein, “directed evolution” refers to a process by which polynucleotide variants are generated, expressed, and screened for an activity (e.g., a polypeptide with binding activity) in a recursive process. One or more candidates in the screen are selected and the process is then repeated using polynucleotides that encode the selected candidates to generate new variants. Directed evolution involves at least two rounds of variation generation and can include 3, 4, 5, 10, 20 or more rounds of variation generation and selection. Variation can be generated by any method known to those of skill in the art, including, e.g., by error-prone PCR, gene recombination, chemical mutagenesis and the like.

[0117] The term “shuffling” is used herein to indicate recombination between non-identical sequences. In some embodiments, shuffling can include crossover via homologous recombination or via non-homologous recombination, such as via cre/lox and/or flp/frt systems. Shuffling can be carried out by employing a variety of different formats, including for example, in vitro and in vivo shuffling formats, in silico shuffling formats, shuffling formats that utilize either double-stranded or single-stranded templates, primer based shuffling formats, nucleic acid fragmentation-based shuffling formats, and oligonucleotide-mediated shuffling formats, all of which are based on recombination events between non-identical sequences and are described in more detail or referenced herein below, as well as other similar recombination-based formats. The term “random” as used herein refers to a polynucleotide sequence or an amino acid sequence composed of two or more amino acids and constructed by a stochastic or random process. The random polynucleotide sequence or amino acid sequence can include framework or scaffolding motifs, which can comprise invariant sequences.

[0118] The term “pseudorandom” as used herein refers to a set of sequences, polynucleotide or polypeptide, that have limited variability, so that the degree of residue variability at some positions is limited, but any pseudorandom position is allowed at least some degree of residue variation.

[0119] The terms “polypeptide,” “peptide,” and “protein” are used herein interchangeably to refer to an amino acid sequence of two or more amino acids.

[0120] Conservative amino acid substitution” refers to the interchangeability of residues having similar side chains. For example, a group of amino acids having aliphatic side chains is glycine, alanine, valine, leucine, and isoleucine; a group of amino acids having aliphatic-hydroxyl side chains is serine and threonine; a group of amino acids having amide-containing side chains is asparagine and glutamine; a group of amino acids having aromatic side chains is phenylalanine, tyrosine, and tryptophan; a group of amino acids having basic side chains is lysine, arginine, and histidine; and a group of amino acids having sulfur-containing side chains is cysteine and methionine. Preferred conservative amino acids substitution groups are: valine-leucine-isoleucine, phenylalanine-tyrosine, lysine-arginine, alanine-valine, and asparagine-glutamine.

[0121] The phrase “nucleic acid sequence” refers to a single or double-stranded polymer of deoxyribonucleotide or ribonucleotide bases read from the 5′ to the 3′ end. It includes chromosomal DNA, self-replicating plasmids and DNA or RNA that performs a primarily structural role.

[0122] The term “encoding” refers to a polynucleotide sequence encoding one or more amino acids. The term does not require a start or stop codon. An amino acid sequence can be encoded in any one of six different reading frames provided by a polynucleotide sequence.

[0123] The term “promoter” refers to regions or sequence located upstream and/or downstream from the start of transcription that are involved in recognition and binding of RNA polymerase and other proteins to initiate transcription.

[0124] A “vector” refers to a polynucleotide, which when independent of the host chromosome, is capable of replication in a host organism. Examples of vectors include plasmids. Vectors typically have an origin of replication. Vectors can comprise, e.g., transcription and translation terminators, transcription and translation initiation sequences, and promoters useful for regulation of the expression of the particular nucleic acid.

[0125] The term “recombinant” when used with reference, e.g., to a cell, or nucleic acid, protein, or vector, indicates that the cell, nucleic acid, protein or vector, has been modified by the introduction of a heterologous nucleic acid or protein or the alteration of a native nucleic acid or protein, or that the cell is derived from a cell so modified. Thus, for example, recombinant cells express genes that are not found within the native (nonrecombinant) form of the cell or express native genes that are otherwise abnormally expressed, under-expressed or not expressed at all.

[0126] The phrase “specifically (or selectively) binds” to a polypeptide, when referring to a monomer or multimer, refers to a binding reaction that can be determinative of the presence of the polypeptide in a heterogeneous population of proteins and other biologics. Thus, under standard conditions or assays used in antibody binding assays, the specified monomer or multimer binds to a particular target molecule above background (e.g., 2×, 5×, 10× or more above background) and does not bind in a significant amount to other molecules present in the sample.

[0127] The terms “identical” or percent “identity,” in the context of two or more nucleic acids or polypeptide sequences, refer to two or more sequences or subsequences that are the same. “Substantially identical” refers to two or more nucleic acids or polypeptide sequences having a specified percentage of amino acid residues or nucleotides that are the same (i.e., 60% identity, optionally 65%, 70%, 75%, 80%, 85%, 90%, or 95% identity over a specified region, or, when not specified, over the entire sequence), when compared and aligned for maximum correspondence over a comparison window, or designated region as measured using one of the following sequence comparison algorithms or by manual alignment and visual inspection. Optionally, the identity or substantial identity exists over a region that is at least about 50 nucleotides in length, or more preferably over a region that is 100 to 500 or 1000 or more nucleotides or amino acids in length.

[0128] A polynucleotide or amino acid sequence is “heterologous to” a second sequence if the two sequences are not linked in the same manner as found in naturally-occurring sequences. For example, a promoter operably linked to a heterologous coding sequence refers to a coding sequence which is different from any naturally-occurring allelic variants. The term “heterologous linker,” when used in reference to a multimer, indicates that the multimer comprises a linker and a monomer that are not found in the same relationship to each other in nature (e.g., they form a fusion protein).

[0129] A “non-naturally-occurring amino acid” in a protein sequence refers to any amino acid other than the amino acid that occurs in the corresponding position in an alignment with a naturally-occurring polypeptide with the lowest smallest sum probability where the comparison window is the length of the monomer domain queried and when compared to the non-redundant (“nr”) database of Genbank using BLAST 2.0 as described herein.

[0130] “Percentage of sequence identity” is determined by comparing two optimally aligned sequences over a comparison window, wherein the portion of the polynucleotide sequence in the comparison window may comprise additions or deletions (i.e., gaps) as compared to the reference sequence (which does not comprise additions or deletions) for optimal alignment of the two sequences. The percentage is calculated by determining the number of positions at which the identical nucleic acid base or amino acid residue occurs in both sequences to yield the number of matched positions, dividing the number of matched positions by the total number of positions in the window of comparison and multiplying the result by 100 to yield the percentage of sequence identity.

[0131] The terms “identical” or percent “identity,” in the context of two or more nucleic acids or polypeptide sequences, refer to two or more sequences or subsequences that are the same or have a specified percentage of amino acid residues or nucleotides that are the same, when compared and aligned for maximum correspondence over a comparison window, or designated region as measured using one of the following sequence comparison algorithms or by manual alignment and visual inspection. Such sequences are then said to be “substantially identical.” This definition also refers to the complement of a test sequence. Optionally, the identity exists over a region that is at least about 50 amino acids or nucleotides in length, or more preferably over a region that is 75-100 amino acids or nucleotides in length.

[0132] For sequence comparison, typically one sequence acts as a reference sequence, to which test sequences are compared. When using a sequence comparison algorithm, test and reference sequences are entered into a computer, subsequence coordinates are designated, if necessary, and sequence algorithm program parameters are designated. Default program parameters can be used, or alternative parameters can be designated. The sequence comparison algorithm then calculates the percent sequence identities for the test sequences relative to the reference sequence, based on the program parameters.

[0133] A “comparison window”, as used herein, includes reference to a segment of any one of the number of contiguous positions selected from the group consisting of from 20 to 600, usually about 50 to about 200, more usually about 100 to about 150 in which a sequence may be compared to a reference sequence of the same number of contiguous positions after the two sequences are optimally aligned. Methods of alignment of sequences for comparison are well-known in the art. Optimal alignment of sequences for comparison can be conducted, e.g., by the local homology algorithm of Smith and Waterman (1970) Adv. Appl. Math. 2:482c, by the homology alignment algorithm of Needleman and Wunsch (1970) J. Mol. Biol. 48:443, by the search for similarity method of Pearson and Lipman (1988) Proc. Nat'l. Acad. Sci. USA 85:2444, by computerized implementations of these algorithms (GAP, BESTFIT, FASTA, and TFASTA in the Wisconsin Genetics Software Package, Genetics Computer Group, 575 Science Dr., Madison, Wis.), or by manual alignment and visual inspection (see, e.g., Ausubel et al., Current Protocols in Molecular Biology (1995 supplement)).

[0134] One example of a useful algorithm is the BLAST 2.0 algorithm, which is described in Altschul et al. (1990) J. Mol. Biol. 215:403-410, respectively. Software for performing BLAST analyses is publicly available through the National Center for Biotechnology Information (http://www.ncbi.nlm.nih.gov/). This algorithm involves first identifying high scoring sequence pairs (HSPs) by identifying short words of length W in the query sequence, which either match or satisfy some positive-valued threshold score T when aligned with a word of the same length in a database sequence. T is referred to as the neighborhood word score threshold (Altschul et al., supra). These initial neighborhood word hits act as seeds for initiating searches to find longer HSPs containing them. The word hits are extended in both directions along each sequence for as far as the cumulative alignment score can be increased. Cumulative scores are calculated using, for nucleotide sequences, the parameters M (reward score for a pair of matching residues; always >0) and N (penalty score for mismatching residues; always <0). For amino acid sequences, a scoring matrix is used to calculate the cumulative score. Extension of the word hits in each direction are halted when: the cumulative alignment score falls off by the quantity X from its maximum achieved value; the cumulative score goes to zero or below, due to the accumulation of one or more negative-scoring residue alignments; or the end of either sequence is reached. The BLAST algorithm parameters W, T, and X determine the sensitivity and speed of the alignment. The BLASTN program (for nucleotide sequences) uses as defaults a wordlength (W) of 11, an expectation (E) or 10, M=5, N=−4 and a comparison of both strands. For amino acid sequences, the BLASTP program uses as defaults a wordlength of 3, and expectation (E) of 10, and the BLOSUM62 scoring matrix (see Henikoff and Henikoff (1989) Proc. Natl. Acad. Sci. USA 89:10915) alignments (B) of 50, expectation (E) of 10, M=5, N=-4, and a comparison of both strands.

[0135] The BLAST algorithm also performs a statistical analysis of the similarity between two sequences (see, e.g., Karlin and Altschul (1993) Proc. Natl. Acad. Sci. USA 90:5873-5787). One measure of similarity provided by the BLAST algorithm is the smallest sum probability (P(N)), which provides an indication of the probability by which a match between two nucleotide or amino acid sequences would occur by chance. For example, a nucleic acid is considered similar to a reference sequence if the smallest sum probability in a comparison of the test nucleic acid to the reference nucleic acid is less than about 0.2, more preferably less than about 0.01, and most preferably less than about 0.001.

### BRIEF DESCRIPTION OF THE DRAWINGS

[0136] FIG. 1 schematically illustrates the type, number and order of monomer domains found in members of the LDL-receptor family. These monomer domains include β-Propeller domains, EGF-like domains and LDL receptor class A-domains. The members shown include low-density lipoprotein receptor (LDLR), ApoE Receptor 2 (ApoER2), very-low-density lipoprotein receptor (VLDLR), LDLR-related protein 2 (LRP2) and LDLR-related protein1 (LRP1).

[0137] FIG. 2 schematically illustrates the alignment of partial amino acid sequence from a variety of the LDL-receptor class A-domains (SEQ ID NOS: 103, 100, 65, 117, 128, 21, 29, 39, 30, 77, 58, 50, and 14, respectively in order of appearance) that include two human LRP1 sequences, two human LRP2 sequences, two human LDLR sequences, two human LDVR sequences, one human LRP3 sequence, one human MAT sequence, a human CO6 sequence, and a human SORL sequence, to demonstrate the conserved cysteines.

[0138] FIG. 3, panel A schematically illustrates an example of an A-domain. Panel A schematically illustrates conserved amino acids in an A-domain of about 40 amino acids long. The conserved cysteine residues are indicated by C, and the negatively charged amino acids are indicated by a circle with a minus (“−”) sign. Circles with an “H” indicate hydrophobic residues. Panel B schematically illustrates two folded A-domains connected via a linker. Panel B also indicates two calcium binding sites, dark circles with Ca⁺², and three disulfide bonds within each folded A-domain for a total of 6 disulfide bonds.

[0139] FIG. 4 indicates some of the ligands recognized by the LDL-receptor family, which include inhibitors, proteases, protease complexes, vitamin-carrier complexes, proteins involved in lipoprotein metabolism, non-human ligands, antibiotics, viruses, and others.

[0140] FIG. 5 schematically illustrates a general scheme for identifying monomer domains that bind to a ligand, isolating the selected monomer domains, creating multimers of the selected monomer domains by joining the selected monomer domains in various combinations and screening the multimers to identify multimers comprising more than one monomer that binds to a ligand.

[0141] FIG. 6 is a schematic representation of another selection strategy (guided selection). A monomer domain with appropriate binding properties is identified from a library of monomer domains. The identified monomer domain is then linked to monomer domains from another library of monomer domains to form a library of multimers. The multimer library is screened to identify a pair of monomer domains that bind simultaneously to the target. This process can then be repeated until the optimal binding properties are obtained in the multimer.

[0142] FIG. 7 shows the multimerization process of monomer domains. The target-binding monomer hits are amplified from a vector. This mixture of target-binding monomer domains and/or immuno-domains is then cleaved and mixed with an optimal combination of linker and stopper oligonucleotides. The multimers that are generated are then cloned into a suitable vector for the second selection step for identification of target-binding multimers.

[0143] FIG. 8 depicts common amino acids in each position of the A domain. The percentages above the amino acid positions refer to the percentage of naturally-occurring A domains with the inter-cysteine spacing displayed. Potential amino acid residues in bold depicted under each amino acid position represent common residues at that position. The final six amino acids, depicted as lighter-colored circles, represent linker sequences. The two columns of italicized amino acid residues at positions 2 and 3 of the linker represent amino acid residues that do not occur at that position. Any other amino acid (e.g., A, D, E, G, H, I, K, L, N, P, Q, R, S, T, and V) may be included at these positions.

[0144] FIG. 9 displays the frequency of occurrence of amino acid residues in naturally-occurring A domains for A domains with the following spacing between cysteines: CX₆CX₄CX6CX₅CX₈C (SEQ ID NO: 199).

[0145] FIG. 10 depicts an alignment of A domains (SEQ ID NO: 1-197). At the top and the bottom of the figure, small letters (a-q) indicate conserved residues. The predominant amino acids at these positions and the frequency with which they were observed in native A domains is illustrated at the bottom of the figure.

[0146] FIG. 11 depicts possible multimer conformations comprised of immuno-domains. FIG. 1A illustrates a multimer of minibodies. FIG. 11B illustrates a multimer of single-domain antibodies. FIG. 11C illustrates an immuno-domain multimer of scfvs. FIG. 11D illustrates a multimer of Fab fragments.

[0147] FIG. 12 depicts linkage of domains via partial linkers.

[0148] FIG. 13 illustrates exemplary multimer ring formations.

[0149] FIG. 14 illustrates various multimer conformations of heavy and light chains of Fvs.

[0150] FIG. 15 is a graphical representation of the regions of sequence identity between the sequences of two different selected clones and known human sequences from a database. The horizontal bars indicate areas of sequence identity between the sequence of the selected clone and the human sequence and the numbers indicate the exact amino acid numbers that define the region of identity. The vertical arrow depicts an acceptable crossover sequence.

[0151] FIG. 16 illustrates cell killing induced by CD₂O-specific A domain monomers.

[0152] FIG. 17 illustrates binding of A domain monomer-expressing phage to recombinant TPO-R and TF1 cells.

[0153] FIG. 18 illustrates TF1 cell proliferation in response to TPO-R-specific A domain monomers and multimers.

[0154] FIG. 19 illustrates IgE-specific A domain monomer and multimer-expressing phage binding to (a) IgE directly immobilized on a plate, or (b) IgE immobilized on the plate by binding to an immobilized antibody to IgE's CE2 domain, or (c) IgE immobilized on the plate by binding to an immobilized antibody to IgE's CE3 domain, or (d) immobilized by binding to immobilized IgE receptor R1.

[0155] FIG. 20 illustrates ELISA binding data of selected A-domain monomers that bind to CD28.

[0156] FIG. 21 illustrates results from a competition ELISA experiment where soluble IL6 receptor and monomer Mb9 are competed against immobilized IL6.

[0157] FIG. 22 illustrates cell proliferation inhibition of by a IL6-specific monomer.

[0158] FIG. 23 illustrates the effect of an IL6-specific monomer on isolated peripheral blood lymphocytes (PBMC).

[0159] FIG. 24 illustrates screening a library of monomer domains against multiple ligands displayed on a cell.

[0160] FIG. 25 illustrates identification of monomers that were selected to bind to one of a plurality of ligands.

[0161] FIG. 26 illustrates an embodiment for identifying polynucleotides encoding ligands and monomer domains.

[0162] FIG. 27 illustrates monomer domain and multimer embodiments for increased avidity. While the figure illustrates specific gene products and binding affinities, it is appreciated that these are merely examples and that other binding targets can be used with the same or similar conformations.

[0163] FIG. 28 illustrates monomer domain and multimer embodiments for increased avidity. While the figure illustrates specific gene products and binding affinities, it is appreciated that these are merely examples and that other binding targets can be used with the same or similar conformations.

[0164] FIG. 29 illustrates various possible antibody-monomer or multimer of the invention) conformations. In some embodiments, the monomer or multimer replaces the Fab fragment of the antibody.

[0165] FIG. 30 illustrates a method for intradomain optimization of monomers.

[0166] FIG. 31 illustrates a possible sequence of multimer optimization steps in which optimal monomers and then multimers are selected followed by optimization of monomers, optimization of linkers and then optimization of multimers.

[0167] FIG. 32 illustrates four possible ways to recombine monomer and/or multimer libraries to introduce new variation.

[0168] FIG. 33 depicts relative binding of selected monomers to CD40L.

[0169] FIG. 34 depicts relative binding of selected monomers to HSA.

### DETAILED DESCRIPTION OF THE INVENTION

[0170] The invention provides an enhanced approach for selecting and optimizing properties of discrete monomer domains and/or immuno-domains to create multimers. In particular, this disclosure describes methods, compositions and kits for identifying discrete monomer domains and/or immuno-domains that bind to a desired ligand or mixture of ligands and creating multimers (also known as combinatorial mosaic proteins or recombinant mosaic proteins) that comprise two or more monomer domains and/or immuno-domains that are joined via a linker. The multimers can be screened to identify those that have an improved phenotype such as improved avidity or affinity or altered specificity for the ligand or the mixture of ligands, compared to the discrete monomer domain.

[0171] 1. Discrete Monomer Domains

[0172] Monomer domains can be polypeptide chains of any size. In some embodiments, monomer domains have about 25 to about 500, about 30 to about 200, about 30 to about 100, about 35 to about 50, about 35 to about 100, about 90 to about 200, about 30 to about 250, about 30 to about 60, about 9 to about 150, about 100 to about 150, about 25 to about 50, or about 30 to about 150 amino acids. Similarly, a monomer domain of the present invention can comprise, e.g., from about 30 to about 200 amino acids; from about 25 to about 180 amino acids; from about 40 to about 150 amino acids; from about 50 to about 130 amino acids; or from about 75 to about 125 amino acids. Monomer domains and immuno-domains can typically maintain a stable conformation in solution. Sometimes, monomer domains and immuno-domains can fold independently into a stable conformation. In one embodiment, the stable conformation is stabilized by metal ions. The stable conformation can optionally contain disulfide bonds (e.g., at least one, two, or three or more disulfide bonds). The disulfide bonds can optionally be formed between two cysteine residues. In some embodiments, monomer domains, or monomer domain variants, are substantially identical to the sequences exemplified (e.g., A, C2) or otherwise referenced herein.

[0173] Publications describing monomer domains and mosaic proteins and references cited within include the following: Hegyi, H and Bork, P., On the classification and evolution of protein modules, (1997) J. Protein Chem., 16(5):545-551; Baron et al., Protein modules (1991) Trends Biochem. Sci., 16(1):13-7; Ponting et al., Evolution of domain families, (2000), Adv. Protein Chem., 54:185-244; Doolittle, The multiplicity of domains in proteins, (1995) Annu. Rev. Biochem 64:287-314; Doolitte and Bork, Evolutionarily mobile modules in proteins (1993) Scientific American, 269 (4):50-6; and Bork, Shuffled domains in extracellularproteins (1991), FEBS letters 286(1-2):47-54. Monomer domains of the present invention also include those domains found in Pfam database and the SMART database. See Schultz, et al., SMART: a web-based tool for the study of genetically mobile domains, (2000) Nucleic Acid Res. 28(1):231-34.

[0174] Monomer domains that are particularly suitable for use in the practice of the present invention are (1) β sandwich domains; (2) β-barrel domains; or (3) cysteine-rich domains comprising disulfide bonds. Cysteine-rich domains employed in the practice of the present invention typically do not form an α helix, a β sheet, or a β-barrel structure. Typically, the disulfide bonds promote folding of the domain into a three-dimensional structure. Usually, cysteine-rich domains have at least two disulfide bonds, more typically at least three disulfide bonds.

[0175] Domains can have any number of characteristics. For example, in some embodiments, the domains have low or no immunogenicity in an animal (e.g., a human). Domains can have a small size. In some embodiments, the domains are small enough to penetrate skin or other tissues. Domains can have a range of in vivo half-lives or stabilities.

[0176] Illustrative monomer domains suitable for use in the practice of the present invention include, e.g., an EGF-like domain, a Kringle-domain, a fibronectin type I domain, a fibronectin type II domain, a fibronectin type III domain, a PAN domain, a Gla domain, a SRCR domain, a Kunitz/Bovine pancreatic trypsin Inhibitor domain, a Kazal-type serine protease inhibitor domain, a Trefoil (P-type) domain, a von Willebrand factor type C domain, an Anaphylatoxin-like domain, a CUB domain, a thyroglobulin type I repeat, LDL-receptor class A domain, a Sushi domain, a Link domain, a Thrombospondin type I domain, an Immunoglobulin-like domain, a C-type lectin domain, a MAM domain, a von Willebrand factor type A domain, a Somatomedin B domain, a WAP-type four disulfide core domain, a F5/8 type C domain, a Hemopexin domain, an SH2 domain, an SH3 domain, a Laminin-type EGF-like domain, a C2 domain, and other such domains known to those of ordinary skill in the art, as well as derivatives and/or variants thereof. In some embodiments, the monomer domain is not the C2 domain. FIG. 1 schematically diagrams various kinds of monomer domains found in molecules in the LDL-receptor family.

[0177] In some embodiments, suitable monomer domains (e.g. domains with the ability to fold independently or with some limited assistance) can be selected from the families of protein domains that contain β-sandwich or β-barrel three dimensional structures as defined by such computational sequence analysis tools as Simple Modular Architecture Research Tool (SMART), see Shultz et al., SMART: a web-based toolfor the study of genetically mobile domains, (2000) Nucleic Acids Research 28(1):231-234) or CATH (see Pearl et.al., Assigning genomic sequences to CATH, (2000) Nucleic Acids Research 28(1):277-282).

[0178] In another embodiment, monomer domains of the present invention include domains other than a fibronectin type III domain, an anticalin domain and a Ig-like domain from CTLA-4. Some aspects of these domains are described in WO01/64942 entitled “Protein scaffolds for antibody mimics and other binding proteins” by Lipovsek et al., published on Sep. 7, 2001, WO99/16873 entitled “Anticalins” by Beste et al., published Apr. 8, 1999 and WO00/60070 entitled “A polypeptide structure for use as a scaffold” by Desmet, et al., published on Oct. 12, 2000.

[0179] As described supra, monomer domains are optionally cysteine rich. Suitable cysteine rich monomer domains include, e.g., the LDL receptor class A domain (“A-domain”) or the EGF-like domain. The monomer domains can also have a cluster of negatively charged residues. Optionally, the monomer domains contain a repeated sequence, such as YWTD (SEQ ID NO: 198) as found in the β-Propeller domain.

[0180] Other features of monomer domains include the ability to bind ligands (e.g., as in the LDL receptor class A domain, or the CUB domain (complement C1r/C1s, Uegf, and bone morphogenic protein-1 domain)), the ability to participate in endocytosis or internalization (e.g., as in the cytoplasmic tail of the LDL receptor or the cytoplasmic tail of Megalin), the ability to bind an ion (e.g., Ca²⁺ binding by the LDL receptor A-domain), and/or the ability to be involved in cell adhesion (e.g., as in the EGF-like domain). Other monomer domains that bind ions to maintain their secondary structure include, e.g., A domain, EGF domain, EF Hand (e.g., such as those found in present in calmodulin and troponin C), Cadherin domain, C-type lectin, C2 domain, Annexin, Gla-domain, Trombospondin type 3 domain, all of which bind calcium, and zinc fingers (e.g., C2H2 type C3HC4 type (RING finger), Integrase Zinc binding domain, PHD finger, GATA zinc finger, FYVE zinc finger, B-box zinc finger), which bind zinc. Without intending to limit the invention, it is believed that ion-binding provides stability of secondary structure while providing sufficient flexibility to allow for numerous binding conformations depending on primary sequence.

[0181] Characteristics of a monomer domain include the ability to fold independently and the ability to form a stable structure. Thus, the structure of the monomer domain is often conserved, although the polynucleotide sequence encoding the monomer need not be conserved. For example, the A-domain structure is conserved among the members of the A-domain family, while the A-domain nucleic acid sequence is not. Thus, for example, a monomer domain is classified as an A-domain by its cysteine residues and its affinity for calcium, not necessarily by its nucleic acid sequence. See, FIG. 2.

[0182] As described herein, monomer domains may be selected for the ability to bind to targets other than the target that a homologous naturally occurring domain may bind. Thus, in some embodiments, the invention provides monomer domains (and multimers comprising such monomers) that do not bind to the target or the class or family of target proteins that a homologous naturally occurring domain may bind.

[0183] Specifically, the A-domains (sometimes called “complement-type repeats”) contain about 30-50 or 30-65 amino acids. In some embodiments, the domains comprise about 35-45 amino acids and in some cases about 40 amino acids. Within the 30-50 amino acids, there are about 6 cysteine residues. Of the six cysteines, disulfide bonds typically are found between the following cysteines: C1 and C3, C2 and C5, C4 and C6. The A domain constitutes a ligand binding moiety. The cysteine residues of the domain are disulfide linked to form a compact, stable, functionally independent moiety. See, FIG. 3. Clusters of these repeats make up a ligand binding domain, and differential clustering can impart specificity with respect to the ligand binding.

[0184] Exemplary A domain sequences and consensus sequences are depicted in FIGS. 2, 3 and 8. FIG. 9 displays location and occurrence of residues in A domains with the following spacing between cysteines. In addition, FIG. 10 depicts a number of A domains and provides a listing of conserved amino acids. One typical consensus sequence useful to identify A domains is the following: C-[VILMA]-X₍₅₎-C-[DNH]-X₍₃₎-[DENQHT]-C-X_{(3,4)}-[STADE]-[DEH]-[DE]-X_{(1,5)}-C (SEQ ID NO: 200), where the residues in brackets indicate possible residues at one position. “X_{(#)}” indicates number of residues. These residues can be any amino acid residue. Parentheticals containing two numbers refers to the range of amino acids that can occupy that position (e.g., “[DE]-X_{(1,5)}-C” means that the amino acids DE are followed by 1, 2, 3, 4, or 5 residues, followed by C). This consensus sequence only represents the portion of the A domain beginning at the third cysteine. A second consensus is as follows: C-X₍₃₋₅₎-C-X₍₄₋₁₅₎-C-X₍₆₋₇₎-C-[N,D]-X₍₃₎-[D,E,N,Q,H,S,T]-C-X₍₄₋₆₎-D-E-X₍₂₋₈₎-C (SEQ ID NO: 201). The second consensus predicts amino acid residues spanning all six cysteine residues. In some embodiments, A domain variants comprise sequences substantially identical to any of the above-described sequences.

[0185] Additional exemplary A domains include the following sequence:
CₐX₃₋₁₅C_{b}X₃₋₁₅C_{c}X₆₋₇C_{d}(D,N)X₄CₑX₄₋₆DEX₂₋₈C_{f}
wherein C is cysteine, Xₙ₋ₘ represents between n and m number of independently selected amino acids, and (D,N) indicates that the position can be either D or N; and wherein Cₐ-C_{c}, C_{b}-Cₑ and C_{d}-C_{f} form disulfide bonds.

[0187] In some embodiments, the monomer domain is an LDL receptor class A domain monomer comprising the following sequence:
CaX₆₋₇C_{b}X₄₋₅C_{c}X₆C_{d}X₅CₑX₈₋₁₀C_{f}
wherein X is defined as follows: [image]
The table above indicates alternative amino acid residues at each position of the LDL receptor class A monomer domain. For example, there can be either 6 or 7 amino acids between cysteine C1 and cysteine C2. The upper left box of the table indicates alternative amino acid residues at each position if there are 6 amino acids between C1 and C2. The bottom left box in the table indicates alternative amino acid residues if there are seven amino acids between C1 and C2. In all cases, the amino acid for one position (e.g., X1) is selected independently of the amino acids selected for remaining positions (e.g., X2, X3, etc.)

[0190] To date, at least 190 human A-domains are identified based on cDNA sequences. See, e.g., FIG. 10. Exemplary proteins containing A-domains include, e.g., complement components (e.g., C6, C7, C8, C9, and Factor I), serine proteases (e.g., enteropeptidase, matriptase, and corin), transmembrane proteins (e.g., ST7, LRP3, LRP5 and LRP6) and endocytic receptors (e.g., Sortilin-related receptor, LDL-receptor, VLDLR, LRP1, LRP2, and ApoER2). A domains and A domain variants can be readily employed in the practice of the present invention as monomer domains and variants thereof. Further description of A domains can be found in the following publications and references cited therein: Howell and Hertz, The LDL receptor gene family: signaling functions during development, (2001) Current Opinion in Neurobiology 11:74-81; Herz (2001), supra; Krieger, The “best” of cholesterols, the “worst” of cholesterols: A tale of two receptors, (1998) PNAS 95: 4077-4080; Goldstein and Brown, The Cholesterol Quartet, (2001) Science, 292: 1310-1312; and, Moestrup and Verroust, Megalin-and Cubilin-Mediated Endocytosis of Protein-Bound Vitamins, Lipids, and Hormones in Polarized Epithelia, (2001) Ann. Rev. Nutr. 21:407-28.

[0191] Another exemplary monomer domain suitable for use in the practice of the present invention is the C2 domain. C2 monomer domains are polypeptides containing a compact β-sandwich composed of two, four-stranded β-sheets, where loops at the “top” of the domain and loops at the “bottom” of the domain connect the eight β-strands. C2 monomer domains may be divided into two subclasses, namely C2 monomer domains with topology I (synaptotagmin-like topology) and topology II (cytosolic phospholipase A2-like topology), respectively. C2 monomer domains with topology I contains three loops at the “top” of the molecule (all of which are Ca²⁺ binding loops), whereas C2 monomer domains with topology II contain four loops at the “top” of the molecule (out of which only three are Ca²⁺ binding loops). The structure of C2 monomer domains have been reviewed by Rizo and Südhof, J. Biol. Chem. 273;15879-15882 (1998) and by Cho, J. Biol. Chem. 276;32407-32410 (2001). The terms “loop region 1”, “loop region 2” and “loop region 3” refer to the Ca²⁺ binding loop regions located at the “top” of the molecule. This nomenclature, which is used to distinguish the three Ca²⁺ binding loops located at the “top” of the molecule from the non-Ca²⁺ binding loops (mainly located at the “bottom” of the molecule) is widely used and recognized in the literature. See Rizo and Südhof, J. Biol. Chem. 273;15879-15882 (1998). Loop regions 1, 2, and 3 represent target binding regions and thus can be varied to modulate binding specificity and affinity. The remaining portions of the C2 domain can be maintained without alteration if desired. Some exemplary C2 domains are substantially identical to the following sequence (SEQ ID NO: 202):

```
Tyr Ser His Lys Phe Thr Val Val Val Leu Arg Ala Thr Lys Val
1 5 10 15
Thr Lys Gly Ala Phe Gly Asp Met Leu Asp Thr Pro Asp Pro Tyr
                                20 25 30
Val Glu Leu Phe Ile Ser Thr Thr Pro Asp Ser Arg Lys Arg Thr
                                35 40 45
Arg His Phe Asn Asn Asp Ile Asn Pro Val Trp Asn Glu Thr Phe
                                50 55 60
Glu Phe Ile Leu Asp Pro Asn Gln Glu Asn Val Leu Glu Ile Thr
                                65 70 75
Leu Met Asp Ala Asn Tyr Val Met Asp Glu Thr Leu Gly Thr Ala
                                80 85 90
Thr Phe Thr Val Ser Ser Met Lys Val Gly Glu Lys Lys Glu Val
                                95 100 105
Pro Phe Ile Phe Asn Gln Val Thr Glu Met Val Leu Glu Met Ser
                                110 115 120
Leu Glu Val
                123.
```

Residues 1-16, 29-48, 54-77 and 86-123 constitute positions located outside loop regions 1, 2 and 3 and residues 17-28, 49-53 and 78-85 constitute the loop regions 1, 2 and 3, respectively.

[0193] Other examples of monomer domains can be found in the protein Cubilin, which contains EGF-type repeats and CUB domains. The CUB domains are involved in ligand binding, e.g., some ligands include intrinsic factor (IF)-vitamin B12, receptor associated protein (RAP), Apo A-I, Transferrin, Albumin, Ig light chains and calcium. See, Moestrup and Verroust, supra.

[0194] Megalin also contains multiple monomer domains. Specifically, megalin possesses LDL-receptor type A-domain, EGF-type repeat, a transmembrane segment and a cytoplasmic tail. Megalin binds a diverse set of ligands, e.g., ApoB, ApoE, ApoJ, clusterin, ApopH/Beta2-glycoprotein-I, PTH, Transthyretin, Thyroglobulin, Insulin, Aminoglycosides, Polymyxin B, Aprotinin, Trichosanthin, PAI-1, PAI-1-urokinase, PAI-1-tPA, Pro-urokinase, Lipoprotein lipase, alpha-Amylase, Albumin, RAP, Ig light chains, calcium, C1q, Lactoferrin, beta2-microglobulin, EGF, Prolactin, Lysozyme, Cytochrome c, PAP-1, Odorant-binding protein, seminal vesicle secretory protein II. See, Moestrup & Verroust, supra.

[0195] Exemplary EGF monomer domains include the sequence:
CₐX₃₋₁₄C_{b}X₃₋₇C_{c}X₄₋₁₆C_{d}X₁₋₂CₑX₈₋₂₃C_{f}
wherein C is cysteine, Xₙ₋ₘ represents between n and m number of independently selected amino acids; and
[0197] wherein Cₐ-C_{c}, C_{b}-Cₑ and C_{d}-C_{f} form disulfide bonds.

[0198] In some embodiments, the monomer domain is an EGF domain monomer comprising the following sequence:
CₐX₄₋₆C_{b}X₃₋₅C_{c}X₈₋₉C_{d}X₁CₑX₈₋₁₂C_{f}
wherein X is defined as follows: [image]
EGF monomer domains are sometimes between 25-45 amino acids and typically 30-39 amino acids.

[0201] Descriptions of some exemplary monomer domains can be found in the following publications and the references cited therein: Yamazaki et al., Elements of Neural Adhesion Molecules and a Yeast Vacuolar Protein Sorting Receptor are Present in a Novel Mammalian Low Density Lipoprotein Receptor Family Member, (1996) Journal of Biological Chemistry 271(40) 24761-24768; Nakayama et al., Identification of High-Molecular-Weight Proteins with Multiple EGF-like Motifs by Motif-Trap Screening, (1998) Genomics 51:27-34; Liu et al, Genomic Organization of New Candidate Tumor Suppressor Gene, LRP1B, (2000) Genomics 69:271-274; Liu et al., The Putative Tumor Suppressor LRP1B, a Novel Member of the Low Density Lipoprotein (LDL) Receptor Family, Exhibits Both Overlapping and Distinct Properties with the LDL Receptor-related Protein, (2001) Journal of Biological Chemistry 276(31):28889-28896; Ishii et al, cDNA of a New Low-Density Lipoprotein Receptor-Related Protein and Mapping of its Gene (LRP3) to Chromosome Bands 19q12-q13.2, (1998) Genomics 51:132-135; Orlando et al, Identification of the second cluster of ligand-binding repeats in megalin as a site for receptor-ligand interactions, (1997) PNAS USA 94:2368-2373; Jeon and Shipley, Vesicle-reconstituted Low Density Lipoprotein Receptor, (2000) Journal of Biological Chemistry 275(39):30458-30464; Simmons et al., Human Low Density Lipoprotein Receptor Fragment, (1997) Journal of Biological Chemistry 272(41):25531-25536; Fass et al., Molecular Basis of familial hypercholesterolaemia from structure of LDL receptor module, (1997) Nature 388:691-93; Daly et al., Three-dimensional structure of a cysteine-rich repeat from the low-density lipoprotein receptor, (1995) PNAS USA 92:6334-6338; North and Blacklow, Structural Independence of Ligand-Binding Modules Five and Six of the LDL Receptor, (1999) Biochemistry 38:3926-3935; North and Blacklow, Solution Structure of the Sixth LDL-A module of the LDL Receptor, (2000) Biochemistry 39:25640-2571; North and Blacklow, Evidence that Familial Hypercholesterolemia Mutations of the LDL Receptor Cause Limited Local Misfolding in an LDL-A Module Pair, (2000) Biochemistry 39:13127-13135; Beglova et al., Backbone Dynamics of a Module Pair from the Ligand-Binding Domain of the LDL Receptor, (2001) Biochemistry 40:2808-2815; Bieri et al., Folding, Calcium binding, and Structural Characterization of a Concatemer of the First and Second Ligand-Binding Modules of the Low-Density Lipoprotein Receptor, (1998) Biochemistry 37:10994-11002; Jeon et al., Implications for familial hypercholesterolemia from the structure of the LDL receptor YWTD-EGF domain pair, (2001) Nature Structural Biology 8(6):499-504; Kurniawan et al., NMR structure of a concatemer of the first and second ligand-binding modules of the human low-density lipoprotein receptor, (2000) Protein Science 9:1282-1293; Esser et al., Mutational Analysis of the Ligand Binding Domain of the Low Density Lipoprotein Receptor, (1988) Journal of Biological Chemistry 263(26):13282-13290; Russell et al., Different Combinations of Cysteine-rich Repeats Mediate Binding of Low Density Lipoprotein Receptor to Two Different Proteins, (1989) Journal of Biological Chemistry 264(36):21682-21688; Davis et al., Acid-dependent ligand dissociation and recycling of LDL receptor mediated by growth factor homology region, (1987) Nature 326:760-765; Rong et al., Conversion of a human low-density lipoprotein receptor ligand-binding repeat to a virus receptor: Identification of residues important for ligand specificity, (1998) PNAS USA 95:8467-8472; Agnello et al., Hepatitis C virus and other Flaviviridae viruses enter cells via low density lipoprotein receptor; (1999) PNAS 96(22):12766-12771; Esser and Russell, Transport-deficient Mutations in the Low Density lipoprotein receptor, (1988) Journal of Biological Chemistry 263(26):13276-13281; Davis et al., The Low Density Lipoprotein Receptor, (1987) Journal of Biological Chemistry 262(9):4075-4082; and, Peacock et al., Human Low Density Lipoprotein Receptor Expressed in Xenopus Oocytes, (1988) Journal of Biological Chemistry 263(16):7838-7845.

[0202] Other publications that describe the VLDLR, ApoER2 and LRP1 proteins and their monomer domains include the following as well as the references cited therein: Savonen et al., The Carboxyl-terminal Domain of Receptor-associated Protein Facilitates Proper Folding and Trafficking of the Very Low Density Lipoprotein Receptor by Interaction with the Three Amino-terminal Ligand-binding Repeats of the Receptor, (1999) Journal of Biological Chemistry 274(36):25877-25882; Hewat et al., The cellular receptor to human rhinovirus 2 binds around the 5-fold axis and not in the canyon a structural view, (2000) EMBO Journal 19(23):6317-6325; Okun et al., VLDL Receptor Fragments of Different Lengths Bind to Human Rhinovirus HRV2 with Different Stoichiometry, (2001) Journal of Biological Chemistry 276(2):1057-1062; Rettenberger et al., Ligand Binding Properties of the Very Low Density Lipoprotein Receptor, (1999) Journal of Biological Chemistry 274(13):8973-8980; Mikhailenko et al., Functional Domains of the very low density lipoprotein receptor: molecular analysis of ligand binding and acid-dependent ligand dissociation mechanisms, (1999) Journal of Cell Science 112:3269-3281; Brandes et al., Alternative Splicing in the Ligand Binding Domain of Mouse ApoE Receptor-2 Produces Receptor Variants Binding Reelin but not alpha2-macroglobulin, (2001) Journal of Biological Chemistry 276(25):22160-22169; Kim et al., Exon/Intron Organization, Chromosome Localization, Alternative Splicing, and Transcription Units of the Human Apolipoprotein E Receptor 2 Gene, (1997) Journal of Biological Chemistry 272(13):8498-8504; Obermoeller-McCornick et al., Dissection of receptor folding and ligand-binding property with functional minireceptors of LDL receptor-related protein, (2001) Journal of Cell Science 114(5):899-908; Horn et al., Molecular Analysis of ligand Binding of the Second Cluster of Complement-type Repeats of the Low Density Lipoprotein Receptor-related Protein, (1997) Journal of Biological Chemistry 272(21):13608-13613; Neels et al., The Second and Fourth Cluster of Class A Cysteine-rich Repeats of the Low Density Lipoprotein Receptor-related Protein Share Ligand-binding Properties, (1999) Journal of Biological Chemistry 274(44):31305-31311; Obermoeller et al., Differential Functions of the Triplicated Repeats Suggest Two Independent Roles for the Receptor-Associated Protein as a Molecular Chaperone, (1997) Journal of Biological Chemistry 272(16):10761-10768; Andersen et al., Identification of the Minimal Functional Unit in the Low Density Lipoprotein Receptor-related Protein for Binding the Receptor-associated Protein (RAP), (2000) Journal of Biological Chemistry 275(28):21017-21024; Andersen et al., Specific Binding of alpha-Macroglobulin to Complement-Type Repeat CR4 of the Low-Density Lipoprotein Receptor-Related Protein, (2000) Biochemistry 39:10627-10633; Vash et al., Three Complement-Type Repeats of the Low-Density Lipoprotein Receptor-Related Protein Define a Common Binding Site for RAP, PAI-1, and Lactoferrin, (1998) Blood 92(9):3277-3285; Dolmer et al., NMR Solution Structure of Complement-like Repeat CR3 from the Low Density Lipoprotein Receptor-related Protein, (2000) Journal of Biological Chemistry 275(5):3264-3269; Huang et al., NMR Solution Structure of Complement-like Repeat CR8 from the Low Density Lipoprotein Receptor-related Protein, (1999) Journal of Biological Chemistry 274(20): 14130-14136; and Liu et al., Uptake of HIV-1 Tat protein mediated by low-density lipoprotein receptor-related protein disrupts the neuronal metabolic balance of the receptor ligands, (2000) Nature Medicine 6(12):1380-1387.

[0203] Other references regarding monomer domains also include the following publications and references cited therein: FitzGerald et al, Pseudomonas Exotoxin-mediated Selection Yields Cells with Altered Expression of Low-Density Lipoprotein Receptor-related Protein, (1995) Journal of Cell Biology, 129: 1533-41; Willnow and Herz, Genetic deficiency in low density lipoprotein receptor-related protein confers cellular resistance to Pseudomonas exotoxin A, (1994) Journal of Cell Science, 107:719-726; Trommsdorf et al., Interaction of Cytosolic Adaptor Proteins with Neuronal Apolipoprotein E Receptors and the Amyloid Precursor Protein, (1998) Journal of Biological Chemistry, 273(5): 33556-33560; Stockinger et al., The Low Density Lipoprotein Receptor Gene Family, (1998) Journal of Biological Chemistry, 273(48): 32213-32221; Obermoeller et al., Ca+2 and Receptor-associated Protein are independently required for proper folding and disulfide bond formation of the low density lipoprotein receptor-related protein, (1998) Journal of Biological Chemistry, 273(35):22374-22381; Sato et al., 39-kDa receptor-associated protein (RAP) facilitates secretion and ligand binding of extracellular region of very-low-density-lipoprotein receptor: implications for a distinct pathway from low-density-lipoprotein receptor, (1999) Biochem. J., 341:377-383; Avromoglu et al, Functional Expression of the Chicken Low Density Lipoprotein Receptor-related Protein in a mutant Chinese Hamster Ovary Cell Line Restores Toxicity of Pseudomonas Exotoxin A and Degradation of alpha2-Macroglobulin, (1998) Journal of Biological Chemistry, 273(11) 6057-6065; Kingsley and Krieger, Receptor-mediated endocytosis of low density lipoprotein: Somatic cell mutants define multiple genes required for expression of surface-receptor activity, (1984) PNAS USA, 81:5454-5458; Li et al, Differential Functions of Members of the Low Density Lipoprotein Receptor Family Suggests by their distinct endocystosis rates, (2001) Journal of Biological Chemistry 276(21):18000-18006; and, Springer, An Extracellular beta-Propeller Module Predicted in Lipoprotein and Scavenger Receptors, Tyrosine Kinases, Epidermal Growth Factor Precursor, and Extracellular Matrix Components, (1998) J. Mol. Biol. 283:837-862.

[0204] Polynucleotides (also referred to as nucleic acids) encoding the monomer domains are typically employed to make monomer domains via expression. Nucleic acids that encode monomer domains can be derived from a variety of different sources. Libraries of monomer domains can be prepared by expressing a plurality of different nucleic acids encoding naturally occurring monomer domains, altered monomer domains (i.e., monomer domain variants), or a combinations thereof.

[0205] The invention provides methods of identifying monomer domains that bind to a selected or desired ligand or mixture of ligands. In some embodiments, monomer domains and/or immuno-domains are identified or selected for a desired property (e.g., binding affinity) and then the monomer domains and/or immuno-domains are formed into multimers. See, e.g., FIG. 5. For those embodiments, any method resulting in selection of domains with a desired property (e.g., a specific binding property) can be used. For example, the methods can comprise providing a plurality of different nucleic acids, each nucleic acid encoding a monomer domain; translating the plurality of different nucleic acids, thereby providing a plurality of different monomer domains; screening the plurality of different monomer domains for binding of the desired ligand or a mixture of ligands; and, identifying members of the plurality of different monomer domains that bind the desired ligand or mixture of ligands.

[0206] As mentioned above, monomer domains can be naturally-occurring or altered (non-natural variants). The term “naturally occurring” is used herein to indicate that an object can be found in nature. For example, natural monomer domains can include human monomer domains or optionally, domains derived from different species or sources, e.g., mammals, primates, rodents, fish, birds, reptiles, plants, etc. The natural occurring monomer domains can be obtained by a number of methods, e.g., by PCR amplification of genomic DNA or cDNA.

[0207] Monomer domains of the present invention can be naturally-occurring domains or non-naturally occurring variants. Libraries of monomer domains employed in the practice of the present invention may contain naturally-occurring monomer domain, non-naturally occurring monomer domain variants, or a combination thereof.

[0208] Monomer domain variants can include ancestral domains, chimeric domains, randomized domains, mutated domains, and the like. For example, ancestral domains can be based on phylogenetic analysis. Chimeric domains are domains in which one or more regions are replaced by corresponding regions from other domains of the same family. For example, chimeric domains can be constructed by combining loop sequences from multiple related domains of the same family to form novel domains with potentially lowered immunogenicity. Those of skill in the art will recognized the immunologic benefit of constructing modified binding domain monomers by combining loop regions from various related domains of the same family rather than creating random amino acid sequences. For example, by constructing variant domains by combining loop sequences or even multiple loop sequences that occur naturally in human LDL receptor class A-domains, the resulting domains may contain novel binding properties but may not contain any immunogenic protein sequences because all of the exposed loops are of human origin. The combining of loop amino acid sequences in endogenous context can be applied to all of the monomer constructs of the invention. Thus the present invention provides a method for generating a library of chimeric monomer domains derived from human proteins, the method comprising: providing loop sequences corresponding to at least one loop from each of at least two different naturally occurring variants of a human protein, wherein the loop sequences are polynucleotide or polypeptide sequences; and covalently combining loop sequences to generate a library of at least two different chimeric sequences, wherein each chimeric sequence encodes a chimeric monomer domain having at least two loops. Typically, the chimeric domain has at least four loops, and usually at least six loops. As described above, the present invention provides three types of loops that are identified by specific features, such as, potential for disulfide bonding, bridging between secondary protein structures, and molecular dynamics (i.e., flexibility). The three types of loop sequences are a cysteine-defined loop sequence, a structure-defined loop sequence, and a B-factor-defined loop sequence.

[0209] Randomized domains are domains in which one or more regions are randomized. The randomization can be based on full randomization, or optionally, partial randomization based on natural distribution of sequence diversity.

[0210] The non-natural monomer domains or altered monomer domains can be produced by a number of methods. Any method of mutagenesis, such as site-directed mutagenesis and random mutagenesis (e.g., chemical mutagenesis) can be used to produce variants. In some embodiments, error-prone PCR is employed to create variants. Additional methods include aligning a plurality of naturally occurring monomer domains by aligning conserved amino acids in the plurality of naturally occurring monomer domains; and, designing the non-naturally occurring monomer domain by maintaining the conserved amino acids and inserting, deleting or altering amino acids around the conserved amino acids to generate the non-naturally occurring monomer domain. In one embodiment, the conserved amino acids comprise cysteines. In another embodiment, the inserting step uses random amino acids, or optionally, the inserting step uses portions of the naturally occurring monomer domains. The portions could ideally encode loops from domains from the same family. Amino acids are inserted or exchanged using synthetic oligonucleotides, or by shuffling, or by restriction enzyme based recombination. Human chimeric domains of the present invention are useful for therapeutic applications where minimal immunogenicity is desired. The present invention provides methods for generating libraries of human chimeric domains. Human chimeric monomer domain libraries can be constructed by combining loop sequences from different variants of a human monomer domain, as described above. The loop sequences that are combined may be sequence-defined loops, structure-defined loops, B-factor-defined loops, or a combination of any two or more thereof.

[0211] Alternatively, a human chimeric domain library can be generated by modifying naturally occurring human monomer domains at the amino acid level, as compared to the loop level. To minimize the potential for immunogenicity, only those residues that naturally occur in protein sequences from the same family of human monomer domains are utilized to create the chimeric sequences. This can be achieved by providing a sequence alignment of at least two human monomer domains from the same family of monomer domains, identifying amino acid residues in corresponding positions in the human monomer domain sequences that differ between the human monomer domains, generating two or more human chimeric monomer domains, wherein each human chimeric monomer domain sequence consists of amino acid residues that correspond in type and position to residues from two or more human monomer domains from the same family of monomer domains. Libraries of human chimeric monomer domains can be employed to identify human chimeric monomer domains that bind to a target of interest by: screening the library of human chimeric monomer domains for binding to a target molecule, and identifying a human chimeric monomer domain that binds to the target molecule. Suitable naturally occurring human monomer domain sequences employed in the initial sequence alignment step include those corresponding to any of the naturally occurring monomer domains described herein.

[0212] Human chimeric domain libraries of the present invention (whether generated by varying loops or single amino acid residues) can be prepared by methods known to those having ordinary skill in the art. Methods particularly suitable for generating these libraries are split-pool format and trinucleotide synthesis format as described in WO01/23401.

[0213] In addition to the invention methods for generating human chimeric domain libraries, the present invention also provides a method for screening a protein for potential immunogenicity by:
[0214] providing a candidate protein sequence;
[0215] comparing the candidate protein sequence to a database of human protein sequences;
[0216] identifying portions of the candidate protein sequence that correspond to portions of human protein sequences from the database; and
[0217] determining the extent of correspondence between the candidate protein sequence and the human protein sequences from the database.

[0218] In general, the greater the extent of correspondence between the candidate protein sequence and one or more of the human protein sequences from the database, the lower the potential for immunogenicity is predicted as compared to a candidate protein having little correspondence with any of the human protein sequences from the database. A database of human protein sequences that is suitable for use in the practice of the invention method for screening candidate proteins can be found at
[0219] ncbi.nlm.nih.gov/blast/Blast.cgi at the World Wide Web (in addition, the following web site can be used to search short, nearly exact matches: cbi.nlm.nih.gov/blast/Blast.cgi?CMD=Web&LAYOUT=TwoWindows&AUTO_FORMAT=Semiauto&ALIGNMENTS=50&ALI GNMENT_VIEW=Pairwise&CLIENT=web&DATABASE=nr&DESCRIPTIONS=100&EN TREZ_QUERY=(none)&EXPECT=1000&FORMAT_OBJECT=Alignment&FORMAT_TY PE=HTML&NCBI_GI=on&PAGE=Nucleotides&PROGRAM=blastn&SERVICE=plain&S ET_DEFAULTS.x=29&SET_DEFAULTS.y=6&SHOW_OVERVIEW=on&WORD_SIZE=7&END_OF_HTTPGET=Yes&SHOW_LINKOUT=yes at the World Wide Web). The method is particularly useful in determining whether a crossover sequence in a chimeric protein, such as, for example, a chimeric monomer domain, is likely to cause an immunogenic event. If the crossover sequence corresponds to a portion of a sequence found in the database of human protein sequences, it is believed that the crossover sequence is less likely to cause an immunogenic event. An example of the comparison step is depicted in FIG. 15, which shows a comparison of two candidate protein sequences to human sequences from a database. The horizontal lines indicate where the human protein sequences from the database are identical to the candidate protein sequence.

[0220] Human chimeric domain libraries prepared in accordance to the methods of the present invention can be screened for potential immunogenicity, in addition to binding affinity. Furthermore, information pertaining to portions of human protein sequences from the database can be used to design a protein library of human-like chimeric proteins. Such library can be generated by using information pertaining to “crossover sequences” that exist in naturally occurring human proteins. The term “crossover sequence” refers herein to a sequence that is found in its entirety in at least one naturally occurring human protein, in which portions of the sequence are found in two or more naturally occurring proteins. Thus, recombination of the latter two or more naturally occurring proteins would generate a chimeric protein in which the chimeric portion of the sequence actually corresponds to a sequence found in another naturally occurring protein. The crossover sequence contains a chimeric junction of two consecutive amino acid residue positions in which the first amino acid position is occupied by an amino acid residue identical in type and position found in a first and second naturally occurring human protein sequence, but not a third naturally occurring human protein sequence. The second amino acid position is occupied by an amino acid residue identical in type and position found in a second and third naturally occurring human protein sequence, but not the first naturally occurring human protein sequence. In other words, the “second” naturally occurring human protein sequence corresponds to the naturally occurring human protein in which the crossover sequence appears in its entirety, as described above.

[0221] In accordance with the present invention, a library of human-like chimeric proteins is generated by: identifying human protein sequences from a database that correspond to proteins from the same family of proteins; aligning the human protein sequences from the same family of proteins to a reference protein sequence; identifying a set of subsequences derived from different human protein sequences of the same family, wherein each subsequence shares a region of identity with at least one other subsequence derived from a different naturally occurring human protein sequence; identifying a chimeric junction from a first, a second, and a third subsequence, wherein each subsequence is derived from a different naturally occurring human protein sequence, and wherein the chimeric junction comprises two consecutive amino acid residue positions in which the first amino acid position is occupied by an amino acid residue common to the first and second naturally occurring human protein sequence, but not the third naturally occurring human protein sequence, and the second amino acid position is occupied by an amino acid residue common to the second and third naturally occurring human protein sequence, and generating human-like chimeric protein molecules each corresponding in sequence to two or more subsequences from the set of subsequences, and each comprising one of more of the identified chimeric junctions.

[0222] Thus, for example, if the first naturally occurring human protein sequence is, A-B-C, and the second is, B-C-D-E, and the third is, D-E-F, then the chimeric junction is C-D. Alternatively, if the first naturally occurring human protein sequence is D-E-F-G, and the second is B-C-D-E-F, and the third is A-B-C-D, then the chimeric junction is D-E. Human-like chimeric protein molecules can be generated in a variety of ways. For example, oligonucleotides comprising sequences encoding the chimeric junctions can be recombined with oligonucleotides corresponding in sequence to two or more subsequences from the above-described set of subsequences to generate a human-like chimeric protein, and libraries thereof. The reference sequence used to align the naturally occurring human proteins is a sequence from the same family of naturally occurring human proteins, or a chimera or other variant of proteins in the family.

[0223] Nucleic acids encoding fragments of naturally-occurring monomer domains and/or immuno-domains can also be mixed and/or recombined (e.g., by using chemically or enzymatically-produced fragments) to generate full-length, modified monomer domains and/or immuno-domains. The fragments and the monomer domain can also be recombined by manipulating nucleic acids encoding domains or fragments thereof. For example, ligating a nucleic acid construct encoding fragments of the monomer domain can be used to generate an altered monomer domain.

[0224] Altered monomer domains can also be generated by providing a collection of synthetic oligonucleotides (e.g., overlapping oligonucleotides) encoding conserved, random, pseudorandom, or a defined sequence of peptide sequences that are then inserted by ligation into a predetermined site in a polynucleotide encoding a monomer domain. Similarly, the sequence diversity of one or more monomer domains can be expanded by mutating the monomer domain(s) with site-directed mutagenesis, random mutation, pseudorandom mutation, defined kemal mutation, codon-based mutation, and the like. The resultant nucleic acid molecules can be propagated in a host for cloning and amplification. In some embodiments, the nucleic acids are recombined.

[0225] The present invention also provides a method for recombining a plurality of nucleic acids encoding monomer domains and screening the resulting library for monomer domains that bind to the desired ligand or mixture of ligands or the like. Selected monomer domain nucleic acids can also be back-crossed by recombining with polynucleotide sequences encoding neutral sequences (i.e., having insubstantial functional effect on binding), such as for example, by back-crossing with a wild-type or naturally-occurring sequence substantially identical to a selected sequence to produce native-like functional monomer domains. Generally, during back-crossing, subsequent selection is applied to retain the property, e.g., binding to the ligand.

[0226] In some embodiments, the monomer library is prepared by recombination. In such a case, monomer domains are isolated and recombined to combinatorially recombine the nucleic acid sequences that encode the monomer domains (recombination can occur between or within monomer domains, or both). The first step involves identifying a monomer domain having the desired property, e.g., affinity for a certain ligand. While maintaining the conserved amino acids during the recombination, the nucleic acid sequences encoding the monomer domains can be recombined, or recombined and joined into multimers.

[0227] Selection of monomer domains and/or immuno-domains from a library of domains can be accomplished by a variety of procedures. For example, one method of identifying monomer domains and/or immuno-domains which have a desired property involves translating a plurality of nucleic acids, where each nucleic acid encodes a monomer domain and/or immuno-domain, screening the polypeptides encoded by the plurality of nucleic acids, and identifying those monomer domains and/or immuno-domains that, e.g., bind to a desired ligand or mixture of ligands, thereby producing a selected monomer domain and/or immuno-domain. The monomer domains and/or immuno-domains expressed by each of the nucleic acids can be tested for their ability to bind to the ligand by methods known in the art (i.e. panning, affinity chromatography, FACS analysis).

[0228] As mentioned above, selection of monomer domains and/or immuno-domains can be based on binding to a ligand such as a target protein or other target molecule (e.g., lipid, carbohydrate, nucleic acid and the like). Other molecules can optionally be included in the methods along with the target, e.g., ions such as Ca⁺². The ligand can be a known ligand, e.g., a ligand known to bind one of the plurality of monomer domains, or e.g., the desired ligand can be an unknown monomer domain ligand. See, e.g., FIG. 4, which illustrates some of the ligands that bind to the A-domain. Other selections of monomer domains and/or immuno-domains can be based, e.g., on inhibiting or enhancing a specific function of a target protein or an activity. Target protein activity can include, e.g., endocytosis or internalization, induction of second messenger system, up-regulation or down-regulation of a gene, binding to an extracellular matrix, release of a molecule(s), or a change in conformation. In this case, the ligand does not need to be known. The selection can also include using high-throughput assays.

[0229] When a monomer domain and/or immuno-domain is selected based on its ability to bind to a ligand, the selection basis can include selection based on a slow dissociation rate, which is usually predictive of high affinity. The valency of the ligand can also be varied to control the average binding affinity of selected monomer domains and/or immuno-domains. The ligand can be bound to a surface or substrate at varying densities, such as by including a competitor compound, by dilution, or by other method known to those in the art. High density (valency) of predetermined ligand can be used to enrich for monomer domains that have relatively low affinity, whereas a low density (valency) can preferentially enrich for higher affinity monomer domains.

[0230] A variety of reporting display vectors or systems can be used to express nucleic acids encoding the monomer domains immuno-domains and/or multimers of the present invention and to test for a desired activity. For example, a phage display system is a system in which monomer domains are expressed as fusion proteins on the phage surface (Pharmacia, Milwaukee Wis.). Phage display can involve the presentation of a polypeptide sequence encoding monomer domains and/or immuno-domains on the surface of a filamentous bacteriophage, typically as a fusion with a bacteriophage coat protein.

[0231] Generally in these methods, each phage particle or cell serves as an individual library member displaying a single species of displayed polypeptide in addition to the natural phage or cell protein sequences. The plurality of nucleic acids are cloned into the phage DNA at a site which results in the transcription of a fusion protein, a portion of which is encoded by the plurality of the nucleic acids. The phage containing a nucleic acid molecule undergoes replication and transcription in the cell. The leader sequence of the fusion protein directs the transport of the fusion protein to the tip of the phage particle. Thus, the fusion protein that is partially encoded by the nucleic acid is displayed on the phage particle for detection and selection by the methods described above and below. For example, the phage library can be incubated with a predetermined (desired) ligand, so that phage particles which present a fusion protein sequence that binds to the ligand can be differentially partitioned from those that do not present polypeptide sequences that bind to the predetermined ligand. For example, the separation can be provided by immobilizing the predetermined ligand. The phage particles (i.e., library members) which are bound to the immobilized ligand are then recovered and replicated to amplify the selected phage subpopulation for a subsequent round of affinity enrichment and phage replication. After several rounds of affinity enrichment and phage replication, the phage library members that are thus selected are isolated and the nucleotide sequence encoding the displayed polypeptide sequence is determined, thereby identifying the sequence(s) of polypeptides that bind to the predetermined ligand. Such methods are further described in PCT patent publication Nos. 91/17271, 91/18980, and 91/19818 and 93/08278.

[0232] Examples of other display systems include ribosome displays, a nucleotide-linked display (see, e.g., U.S. Pat. Nos. 6,281,344; 6,194,550, 6,207,446, 6,214,553, and 6,258,558), polysome display, cell surface displays and the like. The cell surface displays include a variety of cells, e.g., E. coli, yeast and/or mammalian cells. When a cell is used as a display, the nucleic acids, e.g., obtained by PCR amplification followed by digestion, are introduced into the cell and translated. Optionally, polypeptides encoding the monomer domains or the multimers of the present invention can be introduced, e.g., by injection, into the cell.

[0233] The invention also includes compositions that are produced by methods of the the present invention. For example, the present invention includes monomer domains selected or identified from a library and/or libraries comprising monomer domains produced by the methods of the present invention.

[0234] The present invention also provides libraries of monomer domains, immuno-domains and libraries of nucleic acids that encode monomer domains and/or immuno-domains. The libraries can include, e.g., about 100, 250, 500 or more nucleic acids encoding monomer domains and/or immuno-domains, or the library can include, e.g., about 100, 250, 500 or more polypeptides that encode monomer domains and/or immuno-domains. Libraries can include monomer domains containing the same cysteine frame, e.g., A-domains or EGF-like domains.

[0235] In some embodiments, variants are generated by recombining two or more different sequences from the same family of monomer domains and/or immuno-domains (e.g., the LDL receptor class A domain). Alternatively, two or more different monomer domains and/or immuno-domains from different families can be combined to form a multimer. In some embodiments, the multimers are formed from monomers or monomer variants of at least one of the following family classes: an EGF-like domain, a Kringle-domain, a fibronectin type I domain, a fibronectin type II domain, a fibronectin type III domain, a PAN domain, a Gla domain, a SRCR domain, a Kunitz/Bovine pancreatic trypsin Inhibitor domain, a Kazal-type serine protease inhibitor domain, a Trefoil (P-type) domain, a von Willebrand factor type C domain, an Anaphylatoxin-like domain, a CUB domain, a thyroglobulin type I repeat, LDL-receptor class A domain, a Sushi domain, a Link domain, a Thrombospondin type I domain, an Immunoglobulin-like domain, a C-type lectin domain, a MAM domain, a von Willebrand factor type A domain, a Somatomedin B domain, a WAP-type four disulfide core domain, a F5/8 type C domain, a Hemopexin domain, an SH2 domain, an SH3 domain, a Laminin-type EGF-like domain, a C2 domain and derivatives thereof. In another embodiment, the monomer domain and the different monomer domain can include one or more domains found in the Pfam database and/or the SMART database. Libraries produced by the methods above, one or more cell(s) comprising one or more members of the library, and one or more displays comprising one or more members of the library are also included in the present invention.

[0236] Optionally, a data set of nucleic acid character strings encoding monomer domains can be generated e.g., by mixing a first character string encoding a monomer domain, with one or more character string encoding a different monomer domain, thereby producing a data set of nucleic acids character strings encoding monomer domains, including those described herein. In another embodiment, the monomer domain and the different monomer domain can include one or more domains found in the Pfam database and/or the SMART database. The methods can further comprise inserting the first character string encoding the monomer domain and the one or more second character string encoding the different monomer domain in a computer and generating a multimer character string(s) or library(s), thereof in the computer.

[0237] The libraries can be screened for a desired property such as binding of a desired ligand or mixture of ligands. For example, members of the library of monomer domains can be displayed and prescreened for binding to a known or unknown ligand or a mixture of ligands. The monomer domain sequences can then be mutagenized(e.g., recombined, chemically altered, etc.) or otherwise altered and the new monomer domains can be screened again for binding to the ligand or the mixture of ligands with an improved affinity. The selected monomer domains can be combined or joined to form multimers, which can then be screened for an improved affinity or avidity or altered specificity for the ligand or the mixture of ligands. Altered specificity can mean that the specificity is broadened, e.g., binding of multiple related viruses, or optionally, altered specificity can mean that the specificity is narrowed, e.g., binding within a specific region of a ligand. Those of skill in the art will recognize that there are a number of methods available to calculate avidity. See, e.g., Mammen et al., Angew Chem Int. Ed. 37:2754-2794 (1998); Muller et al., Anal. Biochem. 261:149-158 (1998).

[0238] Those of skill in the art will recognize that the steps of generating variation and screening for a desired property can be repeated (i.e., performed recursively) to optimize results. For example, in a phage display library or other like format, a first screening of a library can be performed at relatively lower stringency, thereby selected as many particles associated with a target molecule as possible. The selected particles can then be isolated and the polynucleotides encoding the monomer or multimer can be isolated from the particles. Additional variations can then be generated from these sequences and subsequently screened at higher affinity. FIG. 7 illustrates a generic cycle of selection and generation of variation.

[0239] Compositions of nucleic acids and polypeptides are included in the present invention. For example, the present invention provides a plurality of different nucleic acids wherein each nucleic acid encodes at least one monomer domain or immuno-domain. In some embodiments, at least one monomer domain is selected from the group consisting of: an EGF-like domain, a Kringle-domain, a fibronectin type I domain, a fibronectin type II domain, a fibronectin type III domain, a PAN domain, a Gla domain, a SRCR domain, a Kunitz/Bovine pancreatic trypsin Inhibitor domain, a Kazal-type serine protease inhibitor domain, a Trefoil (P-type) domain, a von Willebrand factor type C domain, an Anaphylatoxin-like domain, a CUB domain, a thyroglobulin type I repeat, LDL-receptor class A domain, a Sushi domain, a Link domain, a Thrombospondin type I domain, an Immunoglobulin-like domain, a C-type lectin domain, a MAM domain, a von Willebrand factor type A domain, a Somatomedin B domain, a WAP-type four disulfide core domain, a F5/8 type C domain, a Hemopexin domain, an SH2 domain, an SH3 domain, a Laminin-type EGF-like domain, a C2 domain and variants of one or more thereof. Suitable monomer domains also include those listed in the Pfam database and/or the SMART database.

[0240] The present invention also provides recombinant nucleic acids encoding one or more polypeptides comprising a plurality of monomer domains and/or immuno-domains, which monomer domains are altered in order or sequence as compared to a naturally occuring polypeptide. For example, the naturally occuring polypeptide can be selected from the group consisting of: an EGF-like domain, a Kringle-domain, a fibronectin type I domain, a fibronectin type II domain, a fibronectin type III domain, a PAN domain, a Gla domain, a SRCR domain, a Kunitz/Bovine pancreatic trypsin Inhibitor domain, a Kazal-type serine protease inhibitor domain, a Trefoil (P-type) domain, a von Willebrand factor type C domain, an Anaphylatoxin-like domain, a CUB domain, a thyroglobulin type I repeat, LDL-receptor class A domain, a Sushi domain, a Link domain, a Thrombospondin type I domain, an Immunoglobulin-like domain, a C-type lectin domain, a MAM domain, a von Willebrand factor type A domain, a Somatomedin B domain, a WAP-type four disulfide core domain, a F5/8 type C domain, a Hemopexin domain, an SH2 domain, an SH3 domain, a Laminin-type EGF-like domain, a C2 domain and variants of one or more thereof. In another embodiment, the naturally occuring polypeptide encodes a monomer domain found in the Pfam database and/or the SMART database.

[0241] All the compositions of the present invention, including the compositions produced by the methods of the present invention, e.g., monomer domains and/or immuno-domains, as well as multimers and libraries thereof can be optionally bound to a matrix of an affinity material. Examples of affinity material include beads, a column, a solid support, a microarray, other pools of reagent-supports, and the like.

[0242] 2. Multimers (also Called Recombinant Mosaic Proteins or Combinatorial Mosaic Proteins)

[0243] Methods for generating multimers are a feature of the present invention. Multimers comprise at least two monomer domains and/or immuno-domains. For example, multimers of the invention can comprise from 2 to about 10 monomer domains and/or immuno-domains, from 2 and about 8 monomer domains and/or immuno-domains, from about 3 and about 10 monomer domains and/or immuno-domains, about 7 monomer domains and/or immuno-domains, about 6 monomer domains and/or immuno-domains, about 5 monomer domains and/or immuno-domains, or about 4 monomer domains and/or immuno-domains. In some embodiments, the multimer comprises at least 3 monomer domains and/or immuno-domains. Typically, the monomer domains have been pre-selected for binding to the target molecule of interest.

[0244] In some embodiments, each monomer domain specifically binds to one target molecule. In some of these embodiments, each monomer binds to a different position (analogous to an epitope) on a target molecule. Multiple monomer domains and/or immuno-domains that bind to the same target molecule results in an avidity effect resulting in improved avidity of the multimer for the target molecule compared to each individual monomer. In some embodiments, the multimer has an avidity of at least about 1.5, 2, 3, 4, 5, 10, 20, 50 or 100 times the avidity of a monomer domain alone. In some embodiments, at least one, twothree, four or more (including all) monomers of a multimer bind an ion such as calcium or another ion.

[0245] In another embodiment, the multimer comprises monomer domains with specificities for different target molecules. For example, multimers of such diverse monomer domains can specifically bind different components of a viral replication system or different serotypes of a virus. In some embodiments, at least one monomer domain binds to a toxin and at least one monomer domain binds to a cell surface molecule, thereby acting as a mechanism to target the toxin. In some embodiments, at least two monomer domains and/or immuno-domains of the multimer bind to different target molecules in a target cell or tissue. Similarly, therapeutic molecules can be targeted to the cell or tissue by binding a therapeutic agent to a monomer of the multimer that also contains other monomer domains and/or immuno-domains having cell or tissue binding specificity.

[0246] Multimers can comprise a variety of combinations of monomer domains. For example, in a single multimer, the selected monomer domains can be the same or identical, optionally, different or non-identical. In addition, the selected monomer domains can comprise various different monomer domains from the same monomer domain family, or various monomer domains from different domain families, or optionally, a combination of both.

[0247] Multimers that are generated in the practice of the present invention may be any of the following:
[0248] (1) A homo-multimer (a multimer of the same domain, i.e., A1-A1-A1-A1);
[0249] (2) A hetero-multimer of different domains of the same domain class, e.g., A1-A2-A3-A4. For example, hetero-multimer include multimers where A1, A2, A3 and A4 are different non-naturally occurring variants of a particular LDL-receptor class A domains, or where some of A1, A2, A3, and A4 are naturally-occurring variants of a LDL-receptor class A domain (see, e.g., FIG. 10).
[0250] (3) A hetero-multimer of domains from different monomer domain classes, e.g., A1-B2-A2-B1. For example, where A1 and A2 are two different monomer domains (either naturally occurring or non-naturally-occurring) from LDL-receptor class A, and B1 and B2 are two different monomer domains (either naturally occurring or non-naturally occurring) from class EGF-like domain).

[0251] Multimer libraries employed in the practice of the present invention may contain homo-multimers, hetero-multimers of different monomer domains (natural or non-natural) of the same monomer class, or hetero-multimers of monomer domains (natural or non-natural) from different monomer classes, or combinations thereof. Exemplary heteromultimers comprising immuno-domains include dimers of, e.g., minibodies, single domain antibodies and Fabs, wherein the dimers are linked by a covalent linker. Other exemplary multimers include, e.g., trimers and higher level (e.g., tetramers) multimers of minibodies, single domain antibodies and Fabs. Yet more exemplary multimers include, e.g., dimers, trimers and higher level multimers of single chain antibody fragments, wherein the single chain antibodies are not linked covalently.

[0252] The present invention provides multimers of V_{H} and V_{L} domains that associate to form multimers of Fvs as depicted in FIG. 13 and FIG. 14B and C. As used herein, the term “Fv” refers to a non-covalently associated V_{H}V_{L} dimer. Such a dimer is depicted, for example, in FIG. 13A, where each pair of overlapping dark and white ellipses represents a single Fv. Fv multimers of the present invention do not comprise a light variable domain covalently linked directly to a heavy variable domain from the same Fv. However, Fv multimers of the present invention can comprise a covalent linkage of the light variable domains and heavy variable domains of the same Fv, that are separated by at least one or more domains. For example, exemplary conformations of a multimer are V_{H1}-V_{H2}-V_{L1}-V_{L2}, or V_{H1}-V_{L2}-V_{L1}-V_{H2} (where V_{L#} and V_{H#} represent the heavy and light variable domains, respectively).

[0253] In these and other embodiments, the heavy and light variable domains are aligned such that the corresponding heavy and light variable domains associate to form the corresponding Fv (i.e., Fv₁=V_{H1}V_{L1}, Fv₂=V_{H2}V_{L2}, etc.). FIGS. 14B and C illustrate such Fv multimers. Those of ordinary skill in the art will readily appreciate that such Fv multimers can comprise additional heavy or light variable domains of an Fv, to form relatively large multimers of, for example, six, eight of more immuno-domains. See, e.g., FIG. 13. The Fvs in an Fv multimer of the present invention are not scFvs (i.e., V_{L1} is not covalently linked to V_{H1}).

[0254] Monomer domains, as described herein, are also readily employed in a immuno-domain-containing heteromultimer (i.e., a multimer that has at least one immuno-domain variant and one monomer domain variant). Thus, multimers of the present invention may have at least one immuno-domain such as a minibody, a single-domain antibody, a single chain variable fragment (ScFv), or a Fab fragment; and at least one monomer domain, such as, for example, an EGF-like domain, a Kringle-domain, a fibronectin type I domain, a fibronectin type II domain, a fibronectin type III domain, a PAN domain, a Gla domain, a SRCR domain, a Kunitz/Bovine pancreatic trypsin Inhibitor domain, a Kazal-type serine protease inhibitor domain, a Trefoil (P-type) domain, a von Willebrand factor type C domain, an Anaphylatoxin-like domain, a CUB domain, a thyroglobulin type I repeat, LDL-receptor class A domain, a Sushi domain, a Link domain, a Thrombospondin type I domain, an Immunoglobulin-like domain, a C-type lectin domain, a MAM domain, a von Willebrand factor type A domain, a Somatomedin B domain, a WAP-type four disulfide core domain, a F5/8 type C domain, a Hemopexin domain, an SH2 domain, an SH3 domain, a Laminin-type EGF-like domain, a C2 domain, or variants thereof.

[0255] Domains need not be selected before the domains are linked to form multimers. On the other hand, the domains can be selected for the ability to bind to a target molecule before being linked into multimers. Thus, for example, a multimer can comprise two domains that bind to one target molecule and a third domain that binds to a second target molecule.

[0256] The selected monomer domains are joined by a linker to form a multimer. For example, a linker is positioned between each separate discrete monomer domain in a multimer. Typically, immuno-domains are also linked to each other or to monomer domains via a linker moiety. Linker moieties that can be readily employed to link immuno-domain variants together are the same as those described for multimers of monomer domain variants. Exemplary linker moieties suitable for joining immuno-domain variants to other domains into multimers are described herein.

[0257] Joining the selected monomer domains via a linker can be accomplished using a variety of techniques known in the art. For example, combinatorial assembly of polynucleotides encoding selected monomer domains can be achieved by restriction digestion and re-ligation, by PCR-based, self-priming overlap reactions, or other rembinant methods. The linker can be attached to a monomer before the monomer is identified for its ability to bind to a target multimer or after the monomer has been selected for the ability to bind to a target multimer.

[0258] The linker can be naturally-occurring, synthetic or a combination of both. For example, the synthetic linker can be a randomized linker, e.g., both in sequence and size. In one aspect, the randomized linker can comprise a fully randomized sequence, or optionally, the randomized linker can be based on natural linker sequences. The linker can comprise, e.g,. a non-polypeptide moiety, a polynucleotide, a polypeptide or the like.

[0259] A linker can be rigid, or alternatively, flexible, or a combination of both. Linker flexibility can be a function of the composition of both the linker and the monomer domains that the linker interacts with. The linker joins two selected monomer domain, and maintains the monomer domains as separate discrete monomer domains. The linker can allow the separate discrete monomer domains to cooperate yet maintain separate properties such as multiple separate binding sites for the same ligand in a multimer, or e.g., multiple separate binding sites for different ligands in a multimer. In some cases, a disulfide bridge exists between two linked monomer domains or between a linker and a monomer domain. In some embodiments, the monmer domains and/or linkers comprise metal-binding centers.

[0260] Choosing a suitable linker for a specific case where two or more monomer domains (i.e. polypeptide chains) are to be connected may depend on a variety of parameters including, e.g. the nature of the monomer domains, the structure and nature of the target to which the polypeptide multimer should bind and/or the stability of the peptide linker towards proteolysis and oxidation.

[0261] The present invention provides methods for optimizing the choice of linker once the desired monomer domains/variants have been identified. Generally, libraries of multimers having a composition that is fixed with regard to monomer domain composition, but variable in linker composition and length, can be readily prepared and screened as described above.

[0262] Typically, the linker polypeptide may predominantly include amino acid residues selected from the group consisting of Gly, Ser, Ala and Thr. For example, the peptide linker may contain at least 75% (calculated on the basis of the total number of residues present in the peptide linker), such as at least 80%, e.g. at least 85% or at least 90% of amino acid residues selected from the group consisting of Gly, Ser, Ala and Thr. The peptide linker may also consist of Gly, Ser, Ala and/or Thr residues only. The linker polypeptide should have a length, which is adequate to link two monomer domains in such a way that they assume the correct conformation relative to one another so that they retain the desired activity, for example as antagonists of a given receptor.

[0263] A suitable length for this purpose is a length of at least one and typically fewer than about 50 amino acid residues, such as 2-25 amino acid residues, 5-20 amino acid residues, 5-15 amino acid residues, 8-12 amino acid residues or 11 residues. Similarly, the polypeptide encoding a linker can range in size, e.g., from about 2 to about 15 amino acids, from about 3 to about 15, from about 4 to about 12, about 10, about 8, or about 6 amino acids. In methods and compositions involving nucleic acids, such as DNA, RNA, or combinations of both, the polynucleotide containing the linker sequence can be, e.g., between about 6 nucleotides and about 45 nucleotides, between about 9 nucleotides and about 45 nucleotides, between about 12 nucleotides and about 36 nucleotides, about 30 nucleotides, about 24 nucleotides, or about 18 nucleotides. Likewise, the amino acid residues selected for inclusion in the linker polypeptide should exhibit properties that do not interfere significantly with the activity or function of the polypeptide multimer. Thus, the peptide linker should on the whole not exhibit a charge which would be inconsistent with the activity or function of the polypeptide multimer, or interfere with internal folding, or form bonds or other interactions with amino acid residues in one or more of the monomer domains which would seriously impede the binding of the polypeptide multimer to the target in question.

[0264] In another embodiment of the invention, the peptide linker is selected from a library where the amino acid residues in the peptide linker are randomized for a specific set of monomer domains in a particular polypeptide multimer. A flexible linker could be used to find suitable combinations of monomer domains, which is then optimized using this random library of variable linkers to obtain linkers with optimal length and geometry. The optimal linkers may contain the minimal number of amino acid residues of the right type that participate in the binding to the target and restrict the movement of the monomer domains relative to each other in the polypeptide multimer when not bound to the target.

[0265] The use of naturally occurring as well as artificial peptide linkers to connect polypeptides into novel linked fusion polypeptides is well known in the literature (Hallewell et al. (1989), J. Biol. Chem. 264, 5260-5268; Alfthan et al. (1995), Protein Eng. 8, 725-731; Robinson & Sauer (1996), Biochemistry 35, 109-116; Khandekar et al. (1997), J. Biol. Chem. 272, 32190-32197; Fares et al. (1998), Endocrinology 139, 2459-2464; Smallshaw et al. (1999), Protein Eng. 12, 623-630; U.S. Pat. No. 5,856,456).

[0266] One example where the use of peptide linkers is widespread is for production of single-chain antibodies where the variable regions of a light chain (V_{L}) and a heavy chain (V_{H}) are joined through an artificial linker, and a large number of publications exist within this particular field. A widely used peptide linker is a 15 mer consisting of three repeats of a Gly-Gly-Gly-Gly-Ser (SEQ ID NO: 240) amino acid sequence ((Gly₄Ser)₃). Other linkers have been used, and phage display technology, as well as, selective infective phage technology has been used to diversify and select appropriate linker sequences (Tang et al. (1996), J. Biol. Chem. 271, 15682-15686; Hennecke et al. (1998), Protein Eng. 11, 405-410). Peptide linkers have been used to connect individual chains in hetero- and homo-dimeric proteins such as the T-cell receptor, the lambda Cro repressor, the P22 phage Arc repressor, IL-12, TSH, FSH, IL-5, and interferon-γ. Peptide linkers have also been used to create fusion polypeptides. Various linkers have been used and in the case of the Arc repressor phage display has been used to optimize the linker length and composition for increased stability of the single-chain protein (Robinson and Sauer (1998), Proc. Natl. Acad. Sci. USA 95, 5929-5934).

[0267] Another type of linker is an intein, i.e. a peptide stretch which is expressed with the single-chain polypeptide, but removed post-translationally by protein splicing. The use of inteins is reviewed by F. S. Gimble in Chemistry and Biology, 1998, Vol 5, No. 10 pp. 251-256.

[0268] Still another way of obtaining a suitable linker is by optimizing a simple linker, e.g. (Gly₄Ser)ₙ (SEQ ID NO: 240), through random mutagenesis.

[0269] As mentioned above, it is generally preferred that the peptide linker possess at least some flexibility. Accordingly, in some embodiments, the peptide linker contains 1-25 glycine residues, 5-20 glycine residues, 5-15 glycine residues or 8-12 glycine residues. The peptide linker will typically contain at least 50% glycine residues, such as at least 75% glycine residues. In some embodiments of the invention, the peptide linker comprises glycine residues only.

[0270] The peptide linker may, in addition to the glycine residues, comprise other residues, in particular residues selected from the group consisting of Ser, Ala and Thr, in particular Ser. Thus, one example of a specific peptide linker includes a peptide linker having the amino acid sequence Glyₓ-Xaa-Gly_{y}-Xaa-Gly_{z} (SEQ ID NO: 203), wherein each Xaa is independently selected from the group consisting Ala, Val, Leu, Ile, Met, Phe, Trp, Pro, Gly, Ser, Thr, Cys, Tyr, Asn, Gln, Lys, Arg, His, Asp and Glu, and wherein x, y and z are each integers in the range from 1-5. In some embodiments, each Xaa is independently selected from the group consisting of Ser, Ala and Thr, in particular Ser. More particularly, the peptide linker has the amino acid sequence Gly-Gly-Gly-Xaa-Gly-Gly-Gly-Xaa-Gly-Gly-Gly (SEQ ID NO: 204), wherein each Xaa is independently selected from the group consisting Ala, Val, Leu, Ile, Met, Phe, Trp, Pro, Gly, Ser, Thr, Cys, Tyr, Asn, Gln, Lys, Arg, His, Asp and Glu. In some embodiments, each Xaa is independently selected from the group consisting of Ser, Ala and Thr, in particular Ser.

[0271] In some cases it may be desirable or necessary to provide some rigidity into the peptide linker. This may be accomplished by including proline residues in the amino acid sequence of the peptide linker. Thus, in another embodiment of the invention, the peptide linker comprises at least one proline residue in the amino acid sequence of the peptide linker. For example, the peptide linker has an amino acid sequence, wherein at least 25%, such as at least 50%, e.g. at least 75%, of the amino acid residues are proline residues. In one particular embodiment of the invention, the peptide linker comprises proline residues only.

[0272] In some embodiments of the invention, the peptide linker is modified in such a way that an amino acid residue comprising an attachment group for a non-polypeptide moiety is introduced. Examples of such amino acid residues may be a cysteine residue (to which the non-polypeptide moiety is then subsequently attached) or the amino acid sequence may include an in vivo N-glycosylation site (thereby attaching a sugar moiety (in vivo) to the peptide linker). An additional option is to genetically incorporate non-natural amino acids using evolved tRNAs and tRNA synthetases (see, e.g., U.S. patent application Publication 2003/0082575) into the monomer domains or linkers. For example, insertion of keto-tyrosine allows for site-specific coupling to expressed monomer domains or multimers.

[0273] In some embodiments of the invention, the peptide linker comprises at least one cysteine residue, such as one cysteine residue. Thus, in some embodiments of the invention the peptide linker comprises amino acid residues selected from the group consisting of Gly, Ser, Ala, Thr and Cys. In some embodiments, such a peptide linker comprises one cysteine residue only.

[0274] In a further embodiment, the peptide linker comprises glycine residues and cysteine residue, such as glycine residues and cysteine residues only. Typically, only one cysteine residue will be included per peptide linker. Thus, one example of a specific peptide linker comprising a cysteine residue, includes a peptide linker having the amino acid sequence Glyₙ-Cys-Glyₘ (SEQ ID NO: 205), wherein n and m are each integers from 1-12, e.g., from 3-9, from 4-8, or from 4-7. More particularly, the peptide linker may have the amino acid sequence GGGGG-C-GGGGG (SEQ ID NO: 206).

[0275] This approach (i.e. introduction of an amino acid residue comprising an attachment group for a non-polypeptide moiety) may also be used for the more rigid proline-containing linkers. Accordingly, the peptide linker may comprise proline and cysteine residues, such as proline and cysteine residues only. An example of a specific proline-containing peptide linker comprising a cysteine residue, includes a peptide linker having the amino acid sequence Proₙ-Cys-Proₘ (SEQ ID NO: 207), wherein n and m are each integers from 1-12, preferably from 3-9, such as from 4-8 or from 4-7. More particularly, the peptide linker may have the amino acid sequence PPPPP-C-PPPPP (SEQ ID NO: 208).

[0276] In some embodiments, the purpose of introducing an amino acid residue, such as a cysteine residue, comprising an attachment group for a non-polypeptide moiety is to subsequently attach a non-polypeptide moiety to said residue. For example, non-polypeptide moieties can improve the serum half-life of the polypeptide multimer. Thus, the cysteine residue can be covalently attached to a non-polypeptide moiety. Preferred examples of non-polypeptide moieties include polymer molecules, such as PEG or mPEG, in particular mPEG as well as non-polypeptide therapeutic agents.

[0277] The skilled person will acknowledge that amino acid residues other than cysteine may be used for attaching a non-polypeptide to the peptide linker. One particular example of such other residue includes coupling the non-polypeptide moiety to a lysine residue.

[0278] Another possibility of introducing a site-specific attachment group for a non-polypeptide moiety in the peptide linker is to introduce an in vivo N-glycosylation site, such as one in vivo N-glycosylation site, in the peptide linker. For example, an in vivo N-glycosylation site may be introduced in a peptide linker comprising amino acid residues selected from the group consisting of Gly, Ser, Ala and Thr. It will be understood that in order to ensure that a sugar moiety is in fact attached to said in vivo N-glycosylation site, the nucleotide sequence encoding the polypeptide multimer must be inserted in a glycosylating, eukaryotic expression host.

[0279] A specific example of a peptide linker comprising an in vivo N-glycosylation site is a peptide linker having the amino acid sequence Glyₙ-Asn-Xaa-Ser/Thr-Glyₘ (SEQ ID NO: 209), preferably Glyₙ-Asn-Xaa-Thr-Glyₘ (SEQ ID NO: 210), wherein Xaa is any amino acid residue except proline, and wherein n and m are each integers in the range from 1-8, preferably in the range from 2-5.

[0280] Often, the amino acid sequences of all peptide linkers present in the polypeptide multimer will be identical. Nevertheless, in certain embodiments the amino acid sequences of all peptide linkers present in the polypeptide multimer may be different. The latter is believed to be particular relevant in case the polypeptide multimer is a polypeptide tri-mer or tetra-mer and particularly in such cases where an amino acid residue comprising an attachment group for a non-polypeptide moiety is included in the peptide linker.

[0281] Quite often, it will be desirable or necessary to attach only a few, typically only one, non-polypeptide moieties/moiety (such as mPEG, a sugar moiety or a non-polypeptide therapeutic agent) to the polypeptide multimer in order to achieve the desired effect, such as prolonged serum-half life. Evidently, in case of a polypeptide tri-mer, which will contain two peptide linkers, only one peptide linker is typically required to be modified, e.g. by introduction of a cysteine residue, whereas modification of the other peptide linker will typically not be necessary not. In this case all (both) peptide linkers of the polypeptide multimer (tri-mer) are different.

[0282] Accordingly, in a further embodiment of the invention, the amino acid sequences of all peptide linkers present in the polypeptide multimer are identical except for one, two or three peptide linkers, such as except for one or two peptide linkers, in particular except for one peptide linker, which has/have an amino acid sequence comprising an amino acid residue comprising an attachment group for a non-polypeptide moiety. Preferred examples of such amino acid residues include cysteine residues of in vivo N-glycosylation sites.

[0283] A linker can be a native or synthetic linker sequence. An exemplary native linker includes, e.g., the sequence between the last cysteine of a first LDL receptor A domain and the first cysteine of a second LDL receptor A domain can be used as a linker sequence. Analysis of various A domain linkages reveals that native linkers range from at least 3 amino acids to fewer than 20 amino acids, e.g., 4, 5, 6, 7, 8, 9, 10, 11, 12, 13, 14, 15, 16, 17, or 18 amino acids long. However, those of skill in the art will recognize that longer or shorter linker sequences can be used. An exemplary A domain linker sequence is depicted in FIG. 8. In some embodiments, the linker is a 6-mer of the following sequence A₁A₂A₃A₄A₅A₆ (SEQ ID NO: 244), wherein A₁ is selected from the amino acids A, P, T, Q, E and K; A₂ and A₃ are any amino acid except C, F, Y, W, or M; A₄ is selected from the amino acids S, G and R; A₅ is selected from the amino acids H, P, and R; and A₆ is the amino acid, T.

[0284] Methods for generating multimers from monomer domains and/or immuno-domains can include joining the selected domains with at least one linker to generate at least one multimer, e.g., the multimer can comprise at least two of the monomer domains and/or immuno-domains and the linker. The multimer(s) is then screened for an improved avidity or affinity or altered specificity for the desired ligand or mixture of ligands as compared to the selected monomer domains. A composition of the multimer produced by the method is included in the present invention.

[0285] In other methods, the selected multimer domains are joined with at least one linker to generate at least two multimers, wherein the two multimers comprise two or more of the selected monomer domains and the linker. The two or more multimers are screened for an improved avidity or affinity or altered specificity for the desired ligand or mixture of ligands as compared to the selected monomer domains. Compositions of two or more multimers produced by the above method are also features of the invention.

[0286] Typically, multimers of the present invention are a single discrete polypeptide. Multimers of partial linker-domain-partial linker moieties are an association of multiple polypeptides, each corresponding to a partial linker-domain-partial linker moiety.

[0287] When multimers capable of binding relatively large targets are desired, they can be generated by a “walking” selection method. This method is carried out by providing a library of monomer domains and screening the library of monomer domains for affinity to a first target molecule. Once at least one monomer that binds to the target is identified, that monomer is covalently linked to a new library or each remaining member of the original library of monomer domains. This new library of multimers (dimers) is then screened for multimers that bind to the target with an increased affinity, and a multimer that binds to the target with an increased affinity can be identified. The “walking” monomer selection method provides a way to assemble a multimer that is composed of monomers that can act additively or even synergistically with each other given the restraints of linker length. This walking technique is very useful when selecting for and assembling multimers that are able to bind large target proteins with high affinity. The walking method can be repeated to add more monomers thereby resulting in a multimer comprising 2, 3, 4, 5, 6, 7, 8 or more monomers linked together.

[0288] In some embodiments, the selected multimer comprises more than two domains. Such multimers can be generated in a step fashion, e.g., where the addition of each new domain is tested individually and the effect of the domains is tested in a sequential fashion. See, e.g., FIG. 6. In an alternate embodiment, domains are linked to form multimers comprising more than two domains and selected for binding without prior knowledge of how smaller multimers, or alternatively, how each domain, bind.

[0289] The methods of the present invention also include methods of evolving monomers or multimers. As illustrated in FIG. 32, intra-domain recombination can be introduced into monomers across the entire monomer or by taking portions of different monomers to form new recombined units. Interdomain recombination (e.g., recombining different monomers into or between multimers) or recombination of modules (e.g., multiple monomers within a multimer) may be achieved. Inter-library recombination is also contemplated.

[0290] Methods for evolving monomers or multimers can comprise, e.g., any or all of the following steps: providing a plurality of different nucleic acids, where each nucleic acid encoding a monomer domain; translating the plurality of different nucleic acids, which provides a plurality of different monomer domains; screening the plurality of different monomer domains for binding of the desired ligand or mixture of ligands; identifying members of the plurality of different monomer domains that bind the desired ligand or mixture of ligands, which provides selected monomer domains; joining the selected monomer domains with at least one linker to generate at least one multimer, wherein the at least one multimer comprises at least two of the selected monomer domains and the at least one linker; and, screening the at least one multimer for an improved affinity or avidity or altered specificity for the desired ligand or mixture of ligands as compared to the selected monomer domains.

[0291] Variation can be introduced into either monomers or multimers. An example of improving monomers includes intra-domain recombination in which two or more (e.g., three, four, five, or more) portions of the monomer are amplified separately under conditions to introduce variation (for example by shuffling or other recombination method) in the resulting amplification products, thereby synthesizing a library of variants for different portions of the monomer. By locating the 5′ ends of the middle primers in a “middle” or ‘overlap’ sequence that both of the PCR fragments have in common, the resulting “left” side and “right” side libraries may be combined by overlap PCR to generate novel variants of the original pool of monomers. These new variants may then be screened for desired properties, e.g., panned against a target or screened for a functional effect. The “middle” primer(s) may be selected to correspond to any segment of the monomer, and will typically be based on the scaffold or one or more concensus amino acids within the monomer (e.g., cysteines such as those found in A domains).

[0292] Similarly, multimers may be created by introducing variation at the monomer level and then recombining monomer variant libraries. On a larger scale, multimers (single or pools) with desired properties may be recombined to form longer multimers. In some cases variation is introduced (typically synthetically) into the monomers or into the linkers to form libraries. This may be achieved, e.g., with two different multimers that bind to two different targets, thereby eventually selecting a multimer with a portion that binds to one target and a portion that binds a second target. See, e.g., FIG. 32.

[0293] Additional variation can be introduced by inserting linkers of different length and composition between domains. This allows for the selection of optimal linkers between domains. In some embodiments, optimal length and composition of linkers will allow for optimal binding of domains. In some embodiments, the domains with a particular binding affinity(s) are linked via different linkers and optimal linkers are selected in a binding assay. For example, domains are selected for desired binding properties and then formed into a library comprising a variety of linkers. The library can then be screened to identify optimal linkers. Alternatively, multimer libraries can be formed where the effect of domain or linker on target molecule binding is not known.

[0294] Methods of the present invention also include generating one or more selected multimers by providing a plurality of monomer domains and/or immuno-domains. The plurality of monomer domains and/or immuno-domains is screened for binding of a desired ligand or mixture of ligands. Members of the plurality of domains that bind the desired ligand or mixture of ligands are identified, thereby providing domains with a desired affinity. The identified domains are joined with at least one linker to generate the multimers, wherein each multimer comprises at least two of the selected domains and the at least one linker; and, the multimers are screened for an improved affinity or avidity or altered specificity for the desired ligand or mixture of ligands as compared to the selected domains, thereby identifying the one or more selected multimers.

[0295] Multimer libraries may be generated, in some embodiments, by combining two or more libraries or monomers or multimers in a recombinase-based approach, where each library member comprises as recombination site (e.g., a lox site). A larger pool of molecularly diverse library members in principle harbor more variants with desired properties, such as higher target-binding affinities and functional activities. When libraries are constructed in phage vectors, which may be transformed into E. coli, library size (10⁹-10¹⁰) is limited by the transformation efficiency of E. coli. A recombinase/recombination site system (e.g., the Cre-loxP system) and in vivo recombination can be exploited to generate libraries that are not limited in size by the transformation efficiency of E. coli.

[0296] For example, the Cre-loxP system may be used to generate dimer libraries with 10¹⁰, 10¹¹, 10¹², 10¹³, or greater diversity. In some embodiments, E. coli as a host for one naive monomer library and a filamentous phage that carries a second naive monomer library are used. The library size in this case is limited only by the number of infective phage (carrying one library) and the number of infectible E. coli cells (carrying the other library). For example, infecting 10¹² E. coli cells (1 L at OD600=1) with >10¹² phage could produce as many as 10¹² dimer combinations.

[0297] Selection of multimers can be accomplished using a variety of techniques including those mentioned above for identifying monomer domains. Other selection methods include, e.g., a selection based on an improved affinity or avidity or altered specificity for the ligand compared to selected monomer domains. For example, a selection can be based on selective binding to specific cell types, or to a set of related cells or protein types (e.g., different virus serotypes). Optimization of the property selected for, e.g., avidity of a ligand, can then be achieved by recombining the domains, as well as manipulating amino acid sequence of the individual monomer domains or the linker domain or the nucleotide sequence encoding such domains, as mentioned in the present invention.

[0298] One method for identifying multimers can be accomplished by displaying the multimers. As with the monomer domains, the multimers are optionally expressed or displayed on a variety of display systems, e.g., phage display, ribosome display, polysome display, nucleotide-linked display (see, e.g., U.S. Pat. Nos. 6,281,344; 6,194,550, 6,207,446, 6,214,553, and 6,258,558) and/or cell surface display, as described above. Cell surface displays can include but are not limited to E. coli, yeast or mammalian cells. In addition, display libraries of multimers with multiple binding sites can be panned for avidity or affinity or altered specificity for a ligand or for multiple ligands.

[0299] Monomers or multimers can be screened for target binding activity in yeast cells using a two-hybrid screening assay. In this type of screen the monomer or multimer library to be screened is cloned into a vector that directs the formation of a fusion protein between each monomer or multimer of the library and a yeast transcriptional activator fragment (i.e., Gal4). Sequences encoding the “target” protein are cloned into a vector that results in the production of a fusion protein between the target and the remainder of the Gal4 protein (the DNA binding domain). A third plasmid contains a reporter gene downstream of the DNA sequence of the Gal4 binding site. A monomer that can bind to the target protein brings with it the Gal4 activation domain, thus reconstituting a functional Gal4 protein. This functional Gal4 protein bound to the binding site upstream of the reporter gene results in the expression of the reporter gene and selection of the monomer or multimer as a target binding protein. (see Chien et. al. (1991) Proc. Natl. Acad. Sci. (USA) 88:9578; Fields S. and Song O. (1989) Nature 340: 245) Using a two-hybrid system for library screening is further described in U.S. Pat. No. 5,811,238 (see also Silver S. C. and Hunt S. W. (1993) Mol. Biol. Rep. 17:155; Durfee et al. (1993) Genes Devel. 7:555; Yang et al. (1992) Science 257:680; Luban et al. (1993) Cell 73:1067; Hardy et al. (1992) Genes Devel. 6:801; Bartel et al. (1993) Biotechniques 14:920; and Vojtek et al. (1993) Cell 74:205). Another useful screening system for carrying out the present invention is the E. coli/BCCP interactive screening system (Germino et al. (1993) Proc. Nat. Acad. Sci. (U.S.A.) 90:993; Guarente L. (1993) Proc. Nat. Acad. Sci. (U.S.A.) 90:1639).

[0300] Other variations include the use of multiple binding compounds, such that monomer domains, multimers or libraries of these molecules can be simultaneously screened for a multiplicity of ligands or compounds that have different binding specificity. Multiple predetermined ligands or compounds can be concomitantly screened in a single library, or sequential screening against a number of monomer domains or multimers. In one variation, multiple ligands or compounds, each encoded on a separate bead (or subset of beads), can be mixed and incubated with monomer domains, multimers or libraries of these molecules under suitable binding conditions. The collection of beads, comprising multiple ligands or compounds, can then be used to isolate, by affinity selection, selected monomer domains, selected multimers or library members. Generally, subsequent affinity screening rounds can include the same mixture of beads, subsets thereof, or beads containing only one or two individual ligands or compounds. This approach affords efficient screening, and is compatible with laboratory automation, batch processing, and high throughput screening methods.

[0301] In another embodiment, multimers can be simultaneously screened for the ability to bind multiple ligands, wherein each ligand comprises a different label. For example, each ligand can be labeled with a different fluorescent label, contacted simultaneously with a multimer or multimer library. Multimers with the desired affinity are then identified (e.g., by FACS sorting) based on the presence of the labels linked to the desired labels.

[0302] Libraries of either monomer domains or multimers (referred in the following discussion for convenience as “affinity agents”) can be screened (i.e., panned) simultaneously against multiple ligands in a number of different formats. For example, multiple ligands can be screened in a simple mixture, in an array, displayed on a cell or tissue (e.g., a cell or tissue provides numerous molecules that can be bound by the monomer domains or multimers of the invention), and/or immobilized. The libraries of affinity agents can optionally be displayed on yeast or phage display systems. Similarly, if desired, the ligands (e.g., encoded in a cDNA library) can be displayed in a yeast or phage display system.

[0303] Initially, the affinity agent library is panned against the multiple ligands. Optionally, the resulting “hits” are panned against the ligands one or more times to enrich the resulting population of affinity agents. See, e.g., FIG. 24.

[0304] If desired, the identity of the individual affinity agents and/or ligands can be determined. In some embodiments, affinity agents are displayed on phage. Affinity agents identified as binding in the initial screen are divided into a first and second portion. See, e.g., FIG. 25. The first portion is infected into bacteria, resulting in either plaques or bacterial colonies, depending on the type of phage used. The expressed phage are immobilized and then probed with ligands displayed in phage selected as described below.

[0305] The second portion are coupled to beads or otherwise immobilized and a phage display library containing at least some of the ligands in the original mixture is contacted to the immobilized second portion. Those phage that bind to the second portion are subsequently eluted and contacted to the immobilized phage described in the paragraph above. Phage-phage interactions are detected (e.g., using a monoclonal antibody specific for the ligand-expressing phage) and the resulting phage polynucleotides can be isolated.

[0306] In some embodiments, the identity of an affinity agent-ligand pair is determined. For example, when both the affinity agent and the ligand are displayed on a phage or yeast, the DNA from the pair can be isolated and sequenced. In some embodiments, polynucleotides specific for the ligand and affinity agent are amplified. Amplification primers for each reaction can include 5′ sequences that are complementary such that the resulting amplification products are fused, thereby forming a hybrid polynucleotide comprising a polynucleotide encoding at least a portion of the affinity agent and at least a portion of the ligand. The resulting hybrid can be used to probe affinity agent or ligand (e.g., cDNA-encoded) polynucleotide libraries to identify both affinity agent and ligand. See, e.g., FIG. 26.

[0307] The above-described methods can be readily combined with “walking” to simultaneous generate and identify multiple multimers, each of which bind to a ligand in a mixture of ligands. In these embodiments, a first library of affinity agents (monomer domains, immuno domains or multimers) are panned against multiple ligands and the eluted affinity agents are linked to the first or a second library of affinity agents to form a library of multimeric affinity agents (e.g., comprising 2, 3, 4, 5, 6, 7, 8, 9, or more monomer or immuno domains), which are subsequently panned against the multiple ligands. This method can be repeated to continue to generate larger multimeric affinity agents. Of course, at each stage, the panning is optionally repeated to enrich for significant binders. In some cases, walking will be facilitated by inserting recombination sites (e.g., lox sites) at the ends of monomers and recombining monomer libraries by a recombinase-mediated event.

[0308] The selected multimers of the above methods can be further manipulated, e.g., by recombining or shuffling the selected multimers (recombination can occur between or within multimers or both), mutating the selected multimers, and the like. This results in altered multimers which then can be screened and selected for members that have an enhanced property compared to the selected multimer, thereby producing selected altered multimers.

[0309] Linkers, multimers or selected multimers produced by the methods indicated above and below are features of the present invention. Libraries comprising multimers, e.g, a library comprising about 100, 250, 500 or more members produced by the methods of the present invention or selected by the methods of the present invention are provided. In some embodiments, one or more cell comprising members of the libraries, are also included. Libraries of the recombinant polypeptides are also a feature of the present invention, e.g., a library comprising about 100, 250, 500 or more different recombinant polypetides.

[0310] Compositions of the present invention can be bound to a matrix of an affinity material, e.g., the recombinant polypeptides. Examples of affinity material include, e.g., beads, a column, a solid support, and/or the like.

[0311] Suitable linkers employed in the practice of the present invention include an obligate heterodimer of partial linker moieties. The term “obligate heterodimer” (also referred to as “affinity peptides”) refers herein to a dimer of two partial linker moieties that differ from each other in composition, and which associate with each other in a non-covalent, specific manner to join two domains together. The specific association is such that the two partial linkers associate substantially with each other as compared to associating with other partial linkers. Thus, in contrast to multimers of the present invention that are expressed as a single polypeptide, multimers of domains that are linked together via heterodimers are assembled from discrete partial linker-monomer-partial linker units. Assembly of the heterodimers can be achieved by, for example, mixing. Thus, if the partial linkers are polypeptide segments, each partial linker-monomer-partial linker unit may be expressed as a discrete peptide prior to multimer assembly. A disulfide bond can be added to covalently lock the peptides together following the correct non-covalent pairing. A multimer containing such obligate heterodimers is depicted in FIG. 12. Partial linker moieties that are appropriate for forming obligate heterodimers include, for example, polynucleotides, polypeptides, and the like. For example, when the partial linker is a polypeptide, binding domains are produced individually along with their unique linking peptide (i.e., a partial linker) and later combined to form multimers. See, e.g., Madden, M., Aldwin, L., Gallop, M. A., and Stemmer, W. P. C. (1993) Peptide linkers: Unique self-associative high-affinity peptide linkers. Thirteenth American Peptide Symposium, Edmonton, Canada (abstract). The spatial order of the binding domains in the multimer is thus mandated by the heterodimeric binding specificity of each partial linker. Partial linkers can contain terminal amino acid sequences that specifically bind to a defined heterologous amino acid sequence. An example of such an amino acid sequence is the Hydra neuropeptide head activator as described in Bodenmuller et al., The neuropeptide head activator loses its biological activity by dimerization, (1986) EMBO J 5(8):1825-1829. See, e.g., U.S. Pat. No. 5,491,074 and WO 94/28173. These partial linkers allow the multimer to be produced first as monomer-partial linker units or partial linker-monomer-partial linker units that are then mixed together and allowed to assemble into the ideal order based on the binding specificities of each partial linker. Alternatively, monomers linked to partial linkers can be contacted to a surface, such as a cell, in which multiple monomers can associate to form higher avidity complexes via partial linkers. In some cases, the association will form via random Brownian motion.

[0312] When the partial linker comprises a DNA binding motif, each monomer domain has an upstream and a downstream partial linker (i.e., Lp-domain-Lp, where “Lp” is a representation of a partial linker) that contains a DNA binding protein with exclusively unique DNA binding specificity. These domains can be produced individually and then assembled into a specific multimer by the mixing of the domains with DNA fragments containing the proper nucleotide sequences (i.e., the specific recognition sites for the DNA binding proteins of the partial linkers of the two desired domains) so as to join the domains in the desired order. Additionally, the same domains may be assembled into many different multimers by the addition of DNA sequences containing various combinations of DNA binding protein recognition sites. Further randomization of the combinations of DNA binding protein recognition sites in the DNA fragments can allow the assembly of libraries of multimers. The DNA can be synthesized with backbone analogs to prevent degradation in vivo.

[0313] A significant advantage of the present invention is that known ligands, or unknown ligands can be used to select the monomer domains and/or multimers. No prior information regarding ligand structure is required to isolate the monomer domains of interest or the multimers of interest. The monomer domains, immuno-domains and/or multimers identified can have biological activity, which is meant to include at least specific binding affinity for a selected or desired ligand, and, in some instances, will further include the ability to block the binding of other compounds, to stimulate or inhibit metabolic pathways, to act as a signal or messenger, to stimulate or inhibit cellular activity, and the like. Monomer domains can be generated to function as ligands for receptors where the natural ligand for the receptor has not yet been identified (orphan receptors). These orphan ligands can be created to either block or activate the receptor top which they bind.

[0314] A single ligand can be used, or optionally a variety of ligands can be used to select the monomer domains, immuno-domains and/or multimers. A monomer domain and/or immuno-domain of the present invention can bind a single ligand or a variety of ligands. A multimer of the present invention can have multiple discrete binding sites for a single ligand, or optionally, can have multiple binding sites for a variety of ligands.

[0315] In some embodiments, the multimer comprises monomer domains and/or immuno-domains with specificities for different proteins. The different proteins can be related or unrelated. Examples of related proteins including members of a protein family or different serotypes of a virus. Alternatively, the monomer domains and/or immuno-domains of a multimer can target different molecules in a physiological pathway (e.g., different blood coagulation proteins). In yet other embodiments, monomer domains and/or immuno-domains bind to proteins in unrelated pathways (e.g., two domains bind to blood factors, two other domains and/or immuno-domains bind to inflammation-related proteins and a fifth binds to serum albumin). In another embodiment, a multimer is comprised of monomer domains that bind to different pathogens or contaminants of interest. Such multimers are useful to as a single detection agent capable of detecting for the possibility of any of a number of pathogens or contaminants.

[0316] The final conformation of the multimers containing immuno-domains can be a ring structure which would offer enhanced stability and other desired characteristics. These cyclic multimers can be expressed as a single polypeptide chain or may be assembled from multiple discrete polypeptide chains. Cyclic multimers assembled from discrete polypeptide chains are typically an assembly of two polypeptide chains. FIG. 13B depicts a cyclic multimer of two polypeptide chains. The formation of cyclic multimer structures can be vastly effected by the spatial arrangement (i.e., distance and order) and dimerization specificity of the individual domains. Parameters such as, for example, linker length, linker composition and order of immuno-domains, can be varied to generate a library of cyclic multimers having diverse structures. Libraries of cyclic multimers can be readily screened in accordance with the invention methods described herein to identify cyclic multimers that bind to desired target molecules. After the multimers are generated, optionally a cyclization step can be carried out to generate a library of cyclized multimers that can be further screened for desired binding activity.

[0317] These cyclic ring structures can be, for example, composed of a multimer of ScFv immuno-domains wherein the immuno-domains are split such that a coiling of the polypeptide multimer chain is required for the immuno-domains to form their proper dimeric structures (e.g., N-terminus-V_{L}1-V_{L}2-V_{L}3-V_{L}4-V_{L}5-V_{L}6-V_{L}7-V_{L}8-V_{H}1-V_{H}2-V_{H}3-V_{H}⁴-V_{H}5-V_{H}⁶-V_{H}⁷-V_{H}⁸-C-terminus, or N-terminus-V_{L}1-V_{H}2-V_{L}3-V_{H}⁴-V_{H}1-V_{L}2-V_{H}3-V_{L}4-C-terminus, and the like). An example of such a cyclic structure is shown in FIG. 13A. The ring could also be formed by the mixing of two polypeptide chains wherein each chain contained half of the immuno-domains. For example, one chain contains the V_{L} domains and the other chain contains the VH domains such that the correct pairs of V_{L}/V_{H} domains are brought together upon the two strands binding. The circularization of the chains can be mandated by changing the frame of the domain order (i.e., polypeptide one: N-terminus-V_{L}1-V_{L}2-V_{L}3-V_{L}4-V_{L}5-V_{L}6-V_{L}7-V_{L}8-C-terminus and polypeptide two: N-terminus-V_{H}4-V_{H}5-V_{H}6-V_{H}7-V_{H}8-V_{H}1-V_{H}2-V_{H}3-C-terminus) as depicted in FIG. 13B.

[0318] A single polypeptide chain that forms a tetrameric ring structure could be very stable and have strong binding characteristics. An example of such a ring is shown in FIG. 13C.

[0319] Cyclic multimers can also be formed by encoding or attaching or linking at least one dimerizing domain at or near the N-terminus of a multimer protein and encoding or attaching or linking at least one second dimerizing domain at or near the C-terminus of the multimer protein wherein the first and second dimerization domain have a strong affinity for each other. As used herein, the term “dimerization domain” refers to a protein binding domain (of either immunological or non-immunological origin) that has the ability to bind to another protein binding domain with great strength and specificity such as to form a dimer. Cyclization of the multimer occurs upon binding of the first and the second dimerization domains to each other. Specifically, dimerization between the two domains will cause the multimer to adopt a cyclical structure. The dimerization domain can form a homodimer in that the domain binds to a protein that is identical to itself. The dimerization domain may form a heterodimer in that the domain binds to a protein binding domain that is different from itself. Some uses for such dimerization domains are described in, e.g., U.S. Pat. No. 5,491,074 and WO 94/28173.

[0320] In some embodiments, the multimers of the invention bind to the same or other multimers to form aggregates. Aggregation can be mediated, for example, by the presence of hydrophobic domains on two monomer domains and/or immuno-domains, resulting in the formation of non-covalent interactions between two monomer domains and/or immuno-domains. Alternatively, aggregation may be facilitated by one or more monomer domains in a multimer having binding specificity for a monomer domain in another multimer. Aggregates can also form due to the presence of affinity peptides on the monomer domains or multimers. Aggregates can contain more target molecule binding domains than a single multimer.

[0321] Multimers with affinity for both a cell surface target and a second target may provide for increased avidity effects. In some cases, membrane fluidity can be more flexible than protein linkers in optimizing (by self-assembly) the spacing and valency of the interactions. In some cases, multimers will bind to two different targets, each on a different cell or one on a cell and another on a molecule with multiple binding sites. See. e.g., FIGS. 27 and 28.

[0322] In some embodiments, the monomers or multimers of the present invention are linked to another polypeptide to form a fusion protein. Any polypeptide in the art may be used as a fusion partner, though it can be useful if the fusion partner forms multimers. For example, monomers or multimers of the invention may, for example, be fused to the following locations or combinations of locations of an antibody:
[0323] 1. At the N-terminus of the VH1 and/or VL1 domains, optionally just after the leader peptide and before the domain starts (framework region 1);
[0324] 2. At the N-terminus of the CH1 or CL1 domain, replacing the VH1 or VL1 domain;
[0325] 3. At the N-terminus of the heavy chain, optionally after the CH1 domain and before the cysteine residues in the hinge (Fc-fusion);
[0326] 4. At the N-terminus of the CH3 domain;
[0327] 5. At the C-terminus of the CH3 domain, optionally attached to the last amino acid residue via a short linker;
[0328] 6. At the C-terminus of the CH2 domain, replacing the CH3 domain;
[0329] 7. At the C-terminus of the CL1 or CH1 domain, optionally after the cysteine that forms the interchain disulfide; or
[0330] 8. At the C-terminus of the VH1 or VL1 domain. See, e.g., FIG. 29.

[0331] In some embodiments, the monomer or multimer domain is linked to a molecule (e.g., a protein, nucleic acid, organic small molecule, etc.) useful as a pharmaceutical. Exemplary pharmaceutical proteins include, e.g., cytokines, antibodies, chemokines, growth factors, interleukins, cell-surface proteins, extracellular domains, cell surface receptors, cytotoxins, etc. Exemplary small molecule pharmaceuticals include small molecule toxins or therapeutic agents.

[0332] In some embodiments, the monomer or multimers are selected to bind to a tissue- or disease-specific target protein. Tissue-specific proteins are proteins that are expressed exclusively, or at a significantly higher level, in one or several particular tissue(s) compared to other tissues in an animal. Similarly, disease-specific proteins are proteins that are expressed exclusively, or at a significantly higher level, in one or several diseased cells or tissues compared to other non-diseased cells or tissues in an animal. Examples of such diseases include, but are not limited to, a cell proliferative disorder such as actinic keratosis, arteriosclerosis, atherosclerosis, bursitis, cirrhosis, hepatitis, mixed connective tissue disease (MCTD), myelofibrosis, paroxysmal nocturnal hemoglobinuria, polycythemia vera, psoriasis, primary thrombocythemia, and cancers including adenocarcinoma, leukemia, lymphoma, melanoma, myeloma, sarcoma, teratocarcinorna, and, in particular, a cancer of the adrenal gland, bladder, bone, bone marrow, brain, breast, cervix, gall bladder, ganglia, gastrointestinal tract, heart, kidney, liver, lung, muscle, ovary, pancreas, parathyroid, penis, prostate, salivary glands, skin, spleen, testis, thymus, thyroid, and uterus; an autoimmune/inflammatory disorder such as acquired immunodeficiency syndrome (AIDS), Addison's disease, adult respiratory distress syndrome, allergies, ankylosing spondylitis, amyloidosis, anemia, asthma, atherosclerosis, autoimmune hemolytic anemia, autoimmune thyroiditis, autoimmune polyendocrinopathycandidiasis-ectodermal dystrophy (APECED), bronchitis, cholecystitis, contact dermatitis, Crohn's disease, atopic dermatitis, dermatomyositis, diabetes mellitus, emphysema, episodic lymphopenia with lymphocytotoxins, erythroblastosis fetalis, erythema nodosum, atrophic gastritis, glomerulonephritis, Goodpasture's syndrome, gout, Graves' disease, Hashimoto's thyroiditis, hypereosinophilia, irritable bowel syndrome, multiple sclerosis, myasthenia gravis, myocardial or pericardial inflammation, osteoarthritis, osteoporosis, pancreatitis, polymyositis, psoriasis, Reiter's syndrome, rheumatoid arthritis, scleroderma, Sjogren's syndrome, systemic anaphylaxis, systemic lupus erythematosus, systemic sclerosis, thrombocytopenic purpura, ulcerative colitis, uveitis, Werner syndrome, complications of cancer, hemodialysis, and extracorporeal circulation, viral, bacterial, fungal, parasitic, protozoal, and helminthic infections, and trauma; a cardiovascular disorder such as congestive heart failure, ischemic heart disease, angina pectoris, myocardial infarction, hypertensive heart disease, degenerative valvular heart disease, calcific aortic valve stenosis, congenitally bicuspid aortic valve, mitral annular calcification, mitral valve prolapse, rheumatic fever and rheumatic heart disease, infective endocarditis, nonbacterial thrombotic endocarditis, endocarditis of systemic lupus erythematosus, carcinoid heart disease, cardiomyopathy, myocarditis, pericarditis, neoplastic heart disease, congenital heart disease, complications of cardiac transplantation, arteriovenous fistula, atherosclerosis, hypertension, vasculitis, Raynaud's disease, aneurysms, arterial dissections, varicose veins, thrombophlebitis and phlebothrombosis, vascular tumors, and complications of thrombolysis, balloon angioplasty, vascular replacement, and coronary artery bypass graft surgery; a neurological disorder such as epilepsy, ischemic cerebrovascular disease, stroke, cerebral neoplasms, Alzheimer's disease, Pick's disease, Huntington's disease, dementia, Parkinson's disease and other extrapyramidal disorders, amyotrophic lateral sclerosis and other motor neuron disorders, progressive neural muscular atrophy, retinitis pigmentosa, hereditary ataxias, multiple sclerosis and other demyelinating diseases, bacterial and viral meningitis, brain abscess, subdural empyema, epidural abscess, suppurative intracranial thrombophlebitis, myelitis and radiculitis, viral central nervous system disease, prion diseases including kuru, Creutzfeldt-Jakob disease, and GerstmannStraussler-Scheinker syndrome, fatal familial insomnia, nutritional and metabolic diseases of the nervous system, neurofibromatosis, tuberous sclerosis, cerebelloretinal hemangioblastomatosis, encephalotrigeminal syndrome, mental retardation and other developmental disorders of the central nervous system including Down syndrome, cerebral palsy, neuroskeletal disorders, autonomic nervous system disorders, cranial nerve disorders, spinal cord diseases, muscular dystrophy and other neuromuscular disorders, peripheral nervous system disorders, dermatomyositis and polymyositis, inherited, metabolic, endocrine, and toxic myopathies, myasthenia gravis, periodic paralysis, mental disorders including mood, anxiety, and schizophrenic disorders, seasonal affective disorder (SAD), akathesia, amnesia, catatonia, diabetic neuropathy, tardive dyskinesia, dystonias, paranoid psychoses, postherpetic neuralgia, Tourette's disorder, progressive supranuclear palsy, corticobasal degeneration, and familial frontotemporal dementia; and a developmental disorder such as renal tubular acidosis, anemia, Cushing's syndrome, achondroplastic dwarfism, Duchenne and Becker muscular dystrophy, epilepsy, gonadal dysgenesis, WAGR syndrome (Wilms' tumor, aniridia, genitourinary abnormalities, and mental retardation), Smith-Magenis syndrome, myelodysplastic syndrome, hereditary mucoepithelial dysplasia, hereditary keratodermas, hereditary neuropathies such as Charcot-Marie-Tooth disease and neurofibromatosis, hypothyroidism, hydrocephalus, seizure disorders such as Syndenham's chorea and cerebral palsy, spina bifida, anencephaly, craniorachischisis, congenital glaucoma, cataract, and sensorineural hearing loss.

[0333] In some embodiments, the monomers or multimers that bind to the target protein are linked to the pharmaceutical protein or small molecule such that the resulting complex or fusion is targeted to the specific tissue or disease-related cell(s) where the target protein is expressed. Monomers or multimers for use in such complexes or fusions can be initially selected for binding to the target protein and may be subsequently selected by negative selection against other cells or tissue (e.g., to avoid targeting bone marrow or other tissues that set the lower limit of drug toxicity) where it is desired that binding be reduced or eliminated in other non-target cells or tissues. By keeping the pharmaceutical away from sensitive tissues, the therapeutic window is increased so that a higher dose may be administered safely. In another alternative, in vivo panning can be performed in animals by injecting a library of monomers or multimers into an animal and then isolating the monomers or multimers that bind to a particular tissue or cell of interest.

[0334] The fusion proteins described above may also include a linker peptide between the pharmaceutical protein and the monomer or multimers. A peptide linker sequence may be employed to separate, for example, the polypeptide components by a distance sufficient to ensure that each polypeptide folds into its secondary and tertiary structures. Fusion proteins may generally be prepared using standard techniques, including chemical conjugation. Fusion proteins can also be expressed as recombinant proteins in an expression system by standard techniques.

[0335] Exemplary tissue-specific or disease-specific proteins can be found in, e.g., Tables I and II of U.S. patent Publication No. 2002/0107215. Exemplary tissues where target proteins may be specifically expressed include, e.g., liver, pancreas, adrenal gland, thyroid, salivary gland, pituitary gland, brain, spinal cord, lung, heart, breast, skeletal muscle, bone marrow, thymus, spleen, lymph node, colorectal, stomach, ovarian, small intestine, uterus, placenta, prostate, testis, colon, colon, gastric, bladder, trachea, kidney, or adipose tissue.

[0336] 3. Therapeutic and Prophylactic Treatment Methods

[0337] The present invention also includes methods of therapeutically or prophylactically treating a disease or disorder by administering in vivo or ex vivo one or more nucleic acids or polypeptides of the invention described above (or compositions comprising a pharmaceutically acceptable excipient and one or more such nucleic acids or polypeptides) to a subject, including, e.g., a mammal, including a human, primate, mouse, pig, cow, goat, rabbit, rat, guinea pig, hamster, horse, sheep; or a non-mammalian vertebrate such as a bird (e.g., a chicken or duck), fish, or invertebrate.

[0338] In one aspect of the invention, in ex vivo methods, one or more cells or a population of cells of interest of the subject (e.g., tumor cells, tumor tissue sample, organ cells, blood cells, cells of the skin, lung, heart, muscle, brain, mucosae, liver, intestine, spleen, stomach, lymphatic system, cervix, vagina, prostate, mouth, tongue, etc.) are obtained or removed from the subject and contacted with an amount of a selected monomer domain and/or multimer of the invention that is effective in prophylactically or therapeutically treating the disease, disorder, or other condition. The contacted cells are then returned or delivered to the subject to the site from which they were obtained or to another site (e.g., including those defined above) of interest in the subject to be treated. If desired, the contacted cells can be grafted onto a tissue, organ, or system site (including all described above) of interest in the subject using standard and well-known grafting techniques or, e.g., delivered to the blood or lymph system using standard delivery or transfusion techniques.

[0339] The invention also provides in vivo methods in which one or more cells or a population of cells of interest of the subject are contacted directly or indirectly with an amount of a selected monomer domain and/or multimer of the invention effective in prophylactically or therapeutically treating the disease, disorder, or other condition. In direct contact/administration formats, the selected monomer domain and/or multimer is typically administered or transferred directly to the cells to be treated or to the tissue site of interest (e.g., tumor cells, tumor tissue sample, organ cells, blood cells, cells of the skin, lung, heart, muscle, brain, mucosae, liver, intestine, spleen, stomach, lymphatic system, cervix, vagina, prostate, mouth, tongue, etc.) by any of a variety of formats, including topical administration, injection (e.g., by using a needle or syringe), or vaccine or gene gun delivery, pushing into a tissue, organ, or skin site. The selected monomer domain and/or multimer can be delivered, for example, intramuscularly, intradermally, subdermally, subcutaneously, orally, intraperitoneally, intrathecally, intravenously, or placed within a cavity of the body (including, e.g., during surgery), or by inhalation or vaginal or rectal administration.

[0340] In in vivo indirect contact/administration formats, the selected monomer domain and/or multimer is typically administered or transferred indirectly to the cells to be treated or to the tissue site of interest, including those described above (such as, e.g., skin cells, organ systems, lymphatic system, or blood cell system, etc.), by contacting or administering the polypeptide of the invention directly to one or more cells or population of cells from which treatment can be facilitated. For example, tumor cells within the body of the subject can be treated by contacting cells of the blood or lymphatic system, skin, or an organ with a sufficient amount of the selected monomer domain and/or multimer such that delivery of the selected monomer domain and/or multimer to the site of interest (e.g., tissue, organ, or cells of interest or blood or lymphatic system within the body) occurs and effective prophylactic or therapeutic treatment results. Such contact, administration, or transfer is typically made by using one or more of the routes or modes of administration described above.

[0341] In another aspect, the invention provides ex vivo methods in which one or more cells of interest or a population of cells of interest of the subject (e.g., tumor cells, tumor tissue sample, organ cells, blood cells, cells of the skin, lung, heart, muscle, brain, mucosae, liver, intestine, spleen, stomach, lymphatic system, cervix, vagina, prostate, mouth, tongue, etc.) are obtained or removed from the subject and transformed by contacting said one or more cells or population of cells with a polynucleotide construct comprising a nucleic acid sequence of the invention that encodes a biologically active polypeptide of interest (e.g., a selected monomer domain and/or multimer) that is effective in prophylactically or therapeutically treating the disease, disorder, or other condition. The one or more cells or population of cells is contacted with a sufficient amount of the polynucleotide construct and a promoter controlling expression of said nucleic acid sequence such that uptake of the polynucleotide construct (and promoter) into the cell(s) occurs and sufficient expression of the target nucleic acid sequence of the invention results to produce an amount of the biologically active polypeptide, encoding a selected monomer domain and/or multimer, effective to prophylactically or therapeutically treat the disease, disorder, or condition. The polynucleotide construct can include a promoter sequence (e.g., CMV promoter sequence) that controls expression of the nucleic acid sequence of the invention and/or, if desired, one or more additional nucleotide sequences encoding at least one or more of another polypeptide of the invention, a cytokine, adjuvant, or co-stimulatory molecule, or other polypeptide of interest.

[0342] Following transfection, the transformed cells are returned, delivered, or transferred to the subject to the tissue site or system from which they were obtained or to another site (e.g., tumor cells, tumor tissue sample, organ cells, blood cells, cells of the skin, lung, heart, muscle, brain, mucosae, liver, intestine, spleen, stomach, lymphatic system, cervix, vagina, prostate, mouth, tongue, etc.) to be treated in the subject. If desired, the cells can be grafted onto a tissue, skin, organ, or body system of interest in the subject using standard and well-known grafting techniques or delivered to the blood or lymphatic system using standard delivery or transfusion techniques. Such delivery, administration, or transfer of transformed cells is typically made by using one or more of the routes or modes of administration described above. Expression of the target nucleic acid occurs naturally or can be induced (as described in greater detail below) and an amount of the encoded polypeptide is expressed sufficient and effective to treat the disease or condition at the site or tissue system.

[0343] In another aspect, the invention provides in vivo methods in which one or more cells of interest or a population of cells of the subject (e.g., including those cells and cells systems and subjects described above) are transformed in the body of the subject by contacting the cell(s) or population of cells with (or administering or transferring to the cell(s) or population of cells using one or more of the routes or modes of administration described above) a polynucleotide construct comprising a nucleic acid sequence of the invention that encodes a biologically active polypeptide of interest (e.g., a selected monomer domain and/or multimer) that is effective in prophylactically or therapeutically treating the disease, disorder, or other condition.

[0344] The polynucleotide construct can be directly administered or transferred to cell(s) suffering from the disease or disorder (e.g., by direct contact using one or more of the routes or modes of administration described above). Alternatively, the polynucleotide construct can be indirectly administered or transferred to cell(s) suffering from the disease or disorder by first directly contacting non-diseased cell(s) or other diseased cells using one or more of the routes or modes of administration described above with a sufficient amount of the polynucleotide construct comprising the nucleic acid sequence encoding the biologically active polypeptide, and a promoter controlling expression of the nucleic acid sequence, such that uptake of the polynucleotide construct (and promoter) into the cell(s) occurs and sufficient expression of the nucleic acid sequence of the invention results to produce an amount of the biologically active polypeptide effective to prophylactically or therapeutically treat the disease or disorder, and whereby the polynucleotide construct or the resulting expressed polypeptide is transferred naturally or automatically from the initial delivery site, system, tissue or organ of the subject's body to the diseased site, tissue, organ or system of the subject's body (e.g., via the blood or lymphatic system). Expression of the target nucleic acid occurs naturally or can be induced (as described in greater detail below) such that an amount of expressed polypeptide is sufficient and effective to treat the disease or condition at the site or tissue system. The polynucleotide construct can include a promoter sequence (e.g., CMV promoter sequence) that controls expression of the nucleic acid sequence and/or, if desired, one or more additional nucleotide sequences encoding at least one or more of another polypeptide of the invention, a cytokine, adjuvant, or co-stimulatory molecule, or other polypeptide of interest.

[0345] In each of the in vivo and ex vivo treatment methods as described above, a composition comprising an excipient and the polypeptide or nucleic acid of the invention can be administered or delivered. In one aspect, a composition comprising a pharmaceutically acceptable excipient and a polypeptide or nucleic acid of the invention is administered or delivered to the subject as described above in an amount effective to treat the disease or disorder.

[0346] In another aspect, in each in vivo and ex vivo treatment method described above, the amount of polynucleotide administered to the cell(s) or subject can be an amount such that uptake of said polynucleotide into one or more cells of the subject occurs and sufficient expression of said nucleic acid sequence results to produce an amount of a biologically active polypeptide effective to enhance an immune response in the subject, including an immune response induced by an immunogen (e.g., antigen). In another aspect, for each such method, the amount of polypeptide administered to cell(s) or subject can be an amount sufficient to enhance an immune response in the subject, including that induced by an immunogen (e.g., antigen).

[0347] In yet another aspect, in an in vivo or in vivo treatment method in which a polynucleotide construct (or composition comprising a polynucleotide construct) is used to deliver a physiologically active polypeptide to a subject, the expression of the polynucleotide construct can be induced by using an inducible on- and off-gene expression system. Examples of such on- and off-gene expression systems include the Tet-On™ Gene Expression System and Tet-Off™ Gene Expression System (see, e.g., Clontech Catalog 2000, pg. 110-111 for a detailed description of each such system), respectively. Other controllable or inducible on- and off-gene expression systems are known to those of ordinary skill in the art. With such system, expression of the target nucleic of the polynucleotide construct can be regulated in a precise, reversible, and quantitative manner. Gene expression of the target nucleic acid can be induced, for example, after the stable transfected cells containing the polynucleotide construct comprising the target nucleic acid are delivered or transferred to or made to contact the tissue site, organ or system of interest. Such systems are of particular benefit in treatment methods and formats in which it is advantageous to delay or precisely control expression of the target nucleic acid (e.g., to allow time for completion of surgery and/or healing following surgery; to allow time for the polynucleotide construct comprising the target nucleic acid to reach the site, cells, system, or tissue to be treated; to allow time for the graft containing cells transformed with the construct to become incorporated into the tissue or organ onto or into which it has been spliced or attached, etc.).

[0348] 4. Additional Multimer Uses

[0349] The potential applications of multimers of the present invention are diverse and include any use where an affinity agent is desired. For example, the invention can be used in the application for creating antagonists, where the selected monomer domains or multimers block the interaction between two proteins. Optionally, the invention can generate agonists. For example, multimers binding two different proteins, e.g., enzyme and substrate, can enhance protein function, including, for example, enzymatic activity and/or substrate conversion.

[0350] Other applications include cell targeting. For example, multimers consisting of monomer domains and/or immuno-domains that recognize specific cell surface proteins can bind selectively to certain cell types. Applications involving monomer domains and/or immuno-domains as antiviral agents are also included. For example, multimers binding to different epitopes on the virus particle can be useful as antiviral agents because of the polyvalency. Other applications can include, but are not limited to, protein purification, protein detection, biosensors, ligand-affinity capture experiments and the like. Furthermore, domains or multimers can be synthesized in bulk by conventional means for any suitable use, e.g., as a therapeutic or diagnostic agent.

[0351] The present invention further provides a method for extending the half-life of a protein of interest in an animal. The protein of interest can be any protein with therapeutic, prophylactic, or otherwise desirable functionality. This method comprises first providing a monomer domain that has been identified as a binding protein that specifically binds to a half-life extender such as a blood-carried molecule or cell, such as serum albumin (e.g., human serum albumin), IgG, red blood cells, etc. The half-life extender-binding monomer is then covalently linked to another monomer domain that has a binding affinity for the protein of interest. These three proteins (half-life extender-binding monomer, protein of interest-binding monomer, and the protein of interest) are then administered to a mammal where they will associate with the half-life extender to form a complex of the four components. This complex formation results in the half-life extender protecting the bound proteins from proteolytic degradation and thereby extending the half-life of the protein (see, e.g., example 3 below). One variation of this use of the invention includes the half-life extender-binding monomer being covalently linked to the protein of interest. The protein of interest may include a monomer domain, a multimer of monomer domains, or a synthetic drug. Alternatively, monomers that bind to either immunoglobulins or erythrocytes could be generated using the above method and could be used for half-life extension.

[0352] The half-life extender-binding multimers are typically multimers of at least two domains, chimeric domains, or mutagenized domains. Suitable domains include all of those described herein, that are further screened and selected for binding to a half-life extender. The half-life extender-binding multimers are generated in accordance with the methods for making multimers described herein, using, for example, monomer domains pre-screened for half-life extender-binding activity. For example, some half-life extender-binding LDL receptor class A-domain monomers are described in Example 2 below. The serum half-life of a molecule can be extended to be, e.g., at least 1, 2, 3, 4, 5, 10, 20, 30, 40, 50, 60, 70 80, 90, 100, 150, 200, 250, 400, 500 or more hours.

[0353] The present invention also provides a method for the suppression of or lowering of an immune response in a mammal. This method comprises first selecting a monomer domain that binds to an immunosuppressive target. Such an “immunosuppressive target” is defined as any protein that when bound by another protein produces an immunosuppressive result in a mammal. The immunosuppressive monomer domain can then be either administered directly or can be covalently linked to another monomer domain or to another protein that will provide the desired targeting of the immunosuppressive monomer. The immunosuppressive multimers are typically multimers of at least two domains, chimeric domains, or mutagenized domains. Suitable domains include all of those described herein and are further screened and selected for binding to an immunosuppressive target. Immunosuppressive multimers are generated in accordance with the methods for making multimers described herein, using, for example, monomer domains pre-screened for CD40L-binding activity. Generation of CD40L-binding LDL receptor class A-domain monomers are described below in Example 4.

[0354] In some embodiments, the monomer domains are used for ligand inhibition, ligand clearance or ligand stimulation. Possible ligands in these methods, include, e.g., cytokines or chemokines.

[0355] If inhibition of ligand binding to a receptor is desired, a monomer domain is selected that binds to the ligand at a portion of the ligand that contacts the ligand's receptor, or that binds to the receptor at a portion of the receptor that binds contacts the ligand, thereby preventing the ligand-receptor interaction. The monomer domains can optionally be linked to a half-life extender, if desired.

[0356] Ligand clearance refers to modulating the half-life of a soluble ligand in bodily fluid. For example, most monomer domains, absent a half-life extender, have a short half-life. Thus, binding of a monomer domain to the ligand will reduce the half-life of the ligand, thereby reducing ligand concentration. The portion of the ligand bound by the monomer domain will generally not matter, though it may be beneficial to bind the ligand at the portion of the ligand that binds to its receptor, thereby further inhibiting the ligand's effect. This method is useful for reducing the concentration of any molecule in the bloodstream.

[0357] Alternatively, a multimer comprising a first monomer domain that binds to a half-life extender and a second monomer domain that binds to a portion of the ligand that does not bind to the ligand's receptor can be used to increase the half-life of the ligand.

[0358] In another embodiment, a multimer comprising a first monomer domain that binds to the ligand and a second monomer domain that binds to the receptor can be used to increase the effective affinity of the ligand for the receptor.

[0359] In another embodiment, multimers comprising at least two monomers that bind to receptors are used to bring two receptors into proximity by both binding the multimer, thereby activating the receptors.

[0360] In some embodiments, multimers with two different monomers can be used to employ a target-driven avidity increase. For example, a first monomer can be targeted to a cell surface molecule on a first cell type and a second monomer can be targeted to a surface molecule on a second cell type. By linking the two monomers to forma a multimer and then adding the multimer to a mixture of the two cell types, binding will occur between the cells once an initial binding event occurs between one multimer and two cells, other multimers will also bind both cells.

[0361] Further examples of potential uses of the invention include monomer domains, and multimers thereof, that are capable of drug binding (e.g., binding radionucleotides for targeting, pharmaceutical binding for half-life extension of drugs, controlled substance binding for overdose treatment and addiction therapy), immune function modulating (e.g., immunogenicity blocking by binding such receptors as CTLA-4, immunogenicity enhancing by binding such receptors as CD80, or complement activation by Fc type binding), and specialized delivery (e.g., slow release by linker cleavage, electrotransport domains, dimerization domains, or specific binding to: cell entry domains, clearance receptors such as FcR, oral delivery receptors such as plgR for trans-mucosal transport, and blood-brain transfer receptors such as transferrinR).

[0362] Additionally, monomers or multimers with different functionality may be combined to form multimers with combined functions. For example, the described HSA-binding monomer and the described CD40L-binding monomer can both be added to another multimer to both lower the immunogenicity and increase the half-life of the multimer.

[0363] In further embodiments, monomers or multimers can be linked to a detectable label (e.g., Cy3, Cy5, etc.) or linked to a reporter gene product (e.g., CAT, luciferase, horseradish peroxidase, alkaline phosphotase, GFP, etc.).

[0364] In some embodiments, the monomers of the invention are selected for the ability to bind antibodies from specific animals, e.g., goat, rabbit, mouse, etc., for use as a secondary reagent in detection assays.

[0365] In some cases, a pair of monomers or multimers are selected to bind to the same target (i.e., for use in sandwich-based assays). To select a matched monomer or multimer pair, two different monomers or multimers typically are able to bind the target protein simultaneously. One approach to identify such pairs involves the following:
[0366] (1) immobilizing the phage or protein mixture that was previously selected to bind the target protein
[0367] (2) contacting the target protein to the immobilized phage or protein and washing;
[0368] (3) contacting the phage or protein mixture to the bound target and washing; and
[0369] (4) eluting the bound phage or protein without eluting the immobilized phage or protein.

[0370] In some embodiments, different phage populations with different drug markers are used.

[0371] One use of the multimers or monomer domains of the invention is use to replace antibodies or other affinity agents in detection or other affinity-based assays. Thus, in some embodiments, monomer domains or multimers are selected against the ability to bind components other than a target in a mixture. The general approach can include performing the affinity selection under conditions that closely resemble the conditions of the assay, including mimicking the composition of a sample during the assay. Thus, a step of selection could include contacting a monomer domain or multimer to a mixture not including the target ligand and selecting against any monomer domains or multimers that bind to the mixture. Thus, the mixtures (absent the target ligand, which could be depleted using an antibody, monomer domain or multimer) representing the sample in an assay (serum, blood, tissue, cells, urine, semen, etc) can be used as a blocking agent. Such subtraction is useful, e.g., to create pharmaceutical proteins that bind to their target but not to other serum proteins or non-target tissues.

[0372] 5. Further Manipulating Monomer Domains and/or Multimer Nucleic Acids and Polypeptides

[0373] As mentioned above, the polypeptide of the present invention can be altered. Descriptions of a variety of diversity generating procedures for generating modified or altered nucleic acid sequences encoding these polypeptides are described above and below in the following publications and the references cited therein: Soong, N. et al., Molecular breeding of viruses, (2000) Nat Genet 25(4):436-439; Stemmer, et al., Molecular breeding of viruses for targeting and other clinical properties, (1999) Tumor Targeting 4:1-4; Ness et al., DNA Shuffling of subgenomic sequences of subtilisin, (1999) Nature Biotechnology 17:893-896; Chang et al., Evolution of a cytokine using DNA family shuffling, (1999) Nature Biotechnology 17:793-797; Minshull and Stemmer, Protein evolution by molecular breeding, (1999) Current Opinion in Chemical Biology 3:284-290; Christians et al., Directed evolution of thymidine kinase for AZT phosphorylation using DNA family shuffling, (1999) Nature Biotechnology 17:259-264; Crameri et al., DNA shuffling of a family of genes from diverse species accelerates directed evolution, (1998) Nature 391:288-291; Crameri et al., Molecular evolution of an arsenate detoxification pathway by DNA shuffling, (1997) Nature Biotechnology 15:436-438; Zhang et al., Directed evolution of an effective fucosidase from a galactosidase by DNA shuffling and screening (1997) Proc. Natl. Acad. Sci. USA 94:4504-4509; Patten et al., Applications of DNA Shuffling to Pharmaceuticals and Vaccines, (1997) Current Opinion in Biotechnology 8:724-733; Crameri et al., Construction and evolution of antibody-phage libraries by DNA shuffling, (1996) Nature Medicine 2:100-103; Crameri et al., Improved green fluorescent protein by molecular evolution using DNA shuffling, (1996) Nature Biotechnology 14:315-319; Gates et al., Affinity selective isolation of ligands from peptide libraries through display on a lac repressor ‘headpiece dimer’, (1996) Journal of Molecular Biology 255:373-386; Stemmer, Sexual PCR and Assembly PCR, (1996) In: The Encyclopedia of Molecular Biology. VCH Publishers, New York. pp.447-457; Crameri and Stemmer, Combinatorial multiple cassette mutagenesis creates all the permutations of mutant and wildtype cassettes, (1995) BioTechniques 18:194-195; Stemmer et al., Single-step assembly of a gene and entire plasmid form large numbers of oligodeoxy-ribonucleotides, (1995) Gene, 164:49-53; Stemmer, The Evolution of Molecular Computation, (1995) Science 270:1510; Stemmer. Searching Sequence Space, (1995) Bio/Technology 13:549-553; Stemmer, Rapid evolution of a protein in vitro by DNA shuffling, (1994) Nature 370:389-391; and Stemmer, DNA shuffling by random fragmentation and reassembly: In vitro recombination for molecular evolution, (1994) Proc. Natl. Acad. Sci. USA 91:10747-10751.

[0374] Mutational methods of generating diversity include, for example, site-directed mutagenesis (Ling et al., Approaches to DNA mutagenesis: an overview, (1997) Anal Biochem. 254(2): 157-178; Dale et al., Oligonucleotide-directed random mutagenesis using the phosphorothioate method, (1996) Methods Mol. Biol. 57:369-374; Smith, In vitro mutagenesis, (1985) Ann. Rev. Genet. 19:423-462; Botstein & Shortle, Strategies and applications of in vitro mutagenesis, (1985) Science 229:1193-1201; Carter, Site-directed mutagenesis, (1986) Biochem. J. 237:1-7; and Kunkel, The efficiency of oligonucleotide directed mutagenesis, (1987) in Nucleic Acids & Molecular Biology (Eckstein, F. and Lilley, D. M. J. eds., Springer Verlag, Berlin)); mutagenesis using uracil containing templates (Kunkel, Rapid and efficient site-specific mutagenesis without phenotypic selection, (1985) Proc. Natl. Acad. Sci. USA 82:488-492; Kunkel et al., Rapid and efficient site-specific mutagenesis without phenotypic selection, (1987) Methods in Enzymol. 154, 367-382; and Bass et al., Mutant Trp repressors with new DNA-binding specificities, (1988) Science 242:240-245); oligonucleotide-directed mutagenesis ((1983) Methods in Enzymol. 100: 468-500; (1987) Methods in Enzymol. 154: 329-350; Zoller & Smith, Oligonucleotide-directed mutagenesis using M13-derived vectors: an efficient and general procedure for the production of point mutations in any DNA fragment, (1982) Nucleic Acids Res. 10:6487-6500; Zoller & Smith, Oligonucleotide-directed mutagenesis of DNA fragments cloned into M13 vectors, (1983) Methods in Enzymol. 100:468-500; and Zoller & Smith, Oligonucleotide-directed mutagenesis: a simple method using two oligonucleotide primers and a single-stranded DNA template, (1987) Methods in Enzymol. 154:329-350); phosphorothioate-modified DNA mutagenesis (Taylor et al., The use of phosphorothioate-modified DNA in restriction enzyme reactions to prepare nicked DNA, (1985) Nucl. Acids Res. 13:8749-8764; Taylor et al., The rapid generation of oligonucleotide-directed mutations at high frequency using phosphorothioate-modified DNA, (1985) Nucl. Acids Res. 13:8765-8787; Nakamaye & Eckstein, Inhibition of restriction endonuclease Nci I cleavage by phosphorothioate groups and its application to oligonucleotide-directed mutagenesis, (1986) Nucl. Acids Res. 14:9679-9698; Sayers et al., Y-T Exonucleases in phosphorothioate-based oligonucleotide-directed mutagenesis, (1988) Nucl. Acids Res. 16:791-802; and Sayers et al., Strand specific cleavage of phosphorothioate-containing DNA by reaction with restriction endonucleases in the presence of ethidium bromide, (1988) Nucl. Acids Res. 16:803-814); mutagenesis using gapped duplex DNA (Kramer et al., The gapped duplex DNA approach to oligonucleotide-directed mutation construction, (1984) Nucl. Acids Res. 12:9441-9456; Kramer & Fritz Oligonucleotide-directed construction of mutations via gapped duplex DNA, (1987) Methods in Enzymol. 154:350-367; Kramer et al., Improved enzymatic in vitro reactions in the gapped duplex DNA approach to oligonucleotide-directed construction of mutations, (1988) Nucl. Acids Res. 16:7207; and Fritz et al., Oligonucleotide-directed construction of mutations: a gapped duplex DNA procedure without enzymatic reactions in vitro, (1988) Nucl. Acids Res. 16:6987-6999).

[0375] Additional suitable methods include point mismatch repair (Kramer et al., Point Mismatch Repair, (1984) Cell 38:879-887), mutagenesis using repair-deficient host strains (Carter et al., Improved oligonucleotide site-directed mutagenesis using M13 vectors, (1985) Nucl. Acids Res. 13:4431-4443; and Carter, Improved oligonucleotide-directed mutagenesis using M13 vectors, (1987) Methods in Enzymol. 154:382-403), deletion mutagenesis (Eghtedarzadeh & Henikoff, Use of oligonucleotides to generate large deletions, (1986) Nucl. Acids Res. 14:5115), restriction-selection and restriction-purification (Wells et al., Importance of hydrogen-bond formation in stabilizing the transition state of subtilisin, (1986) Phil. Trans. R. Soc. Lond. A 317: 415-423), mutagenesis by total gene synthesis (Nambiar et al., Total synthesis and cloning of a gene coding for the ribonuclease S protein, (1984) Science 223:1299-1301; Sakamar and Khorana, Total synthesis and expression of a gene for the a-subunit of bovine rod outer segment guanine nucleotide-binding protein (transducin), (1988) Nucl. Acids Res. 14:6361-6372; Wells et al., Cassette mutagenesis: an efficient method for generation of multiple mutations at defined sites, (1985) Gene 34:315-323; and Grundström et al., Oligonucleotide-directed mutagenesis by microscale ‘shot-gun’ gene synthesis, (1985) Nucl. Acids Res. 13:3305-3316), double-strand break repair (Mandecki, Oligonucleotide-directed double-strand break repair in plasmids of Escherichia coli: a method for site-specific mutagenesis, (1986) Proc. Natl. Acad. Sci. USA, 83:7177-7181; and Arnold, Protein engineering for unusual environments, (1993) Current Opinion in Biotechnology 4:450-455). Additional details on many of the above methods can be found in Methods in Enzymology Volume 154, which also describes useful controls for trouble-shooting problems with various mutagenesis methods.

[0376] Additional details regarding various diversity generating methods can be found in the following U.S. patents, PCT publications and applications, and EPO publications: U.S. Pat. No. 5,605,793 to Stemmer (Feb. 25, 1997), “Methods for In Vitro Recombination;” U.S. Pat. No. 5,811,238 to Stemmer et al. (Sep. 22, 1998) “Methods for Generating Polynucleotides having Desired Characteristics by Iterative Selection and Recombination;” U.S. Pat. No. 5,830,721 to Stemmer et al. (Nov. 3, 1998), “DNA Mutagenesis by Random Fragmentation and Reassembly;” U.S. Pat. No. 5,834,252 to Stemmer, et al. (Nov. 10, 1998) “End-Complementary Polymerase Reaction;” U.S. Pat. No. 5,837,458 to Minshull, et al. (Nov. 17, 1998), “Methods and Compositions for Cellular and Metabolic Engineering;” WO 95/22625, Stemmer and Crameri, “Mutagenesis by Random Fragmentation and Reassembly;” WO 96/33207 by Stemmer and Lipschutz “End Complementary Polymerase Chain Reaction;” WO 97/20078 by Stemmer and Crameri “Methods for Generating Polynucleotides having Desired Characteristics by Iterative Selection and Recombination;” WO 97/35966 by Minshull and Stemmer, “Methods and Compositions for Cellular and Metabolic Engineering;” WO 99/41402 by Punnonen et al. “Targeting of Genetic Vaccine Vectors;” WO 99/41383 by Punnonen et al. “Antigen Library Immunization;” WO 99/41369 by Punnonen et al. “Genetic Vaccine Vector Engineering;” WO 99/41368 by Punnonen et al. “Optimization of Immunomodulatory Properties of Genetic Vaccines;” EP 752008 by Stemmer and Crameri, “DNA Mutagenesis by Random Fragmentation and Reassembly;” EP 0932670 by Stemmer “Evolving Cellular DNA Uptake by Recursive Sequence Recombination;” WO 99/23107 by Stemmer et al., “Modification of Virus Tropism and Host Range by Viral Genome Shuffling;” WO 99/21979 by Apt et al., “Human Papillomavirus Vectors;” WO 98/31837 by del Cardayre et al. “Evolution of Whole Cells and Organisms by Recursive Sequence Recombination;” WO 98/27230 by Patten and Stemmer, “Methods and Compositions for Polypeptide Engineering;” WO 98/27230 by Stemmer et al., “Methods for Optimization of Gene Therapy by Recursive Sequence Shuffling and Selection,” WO 00/00632, “Methods for Generating Highly Diverse Libraries,” WO 00/09679, “Methods for Obtaining in Vitro Recombined Polynucleotide Sequence Banks and Resulting Sequences,” WO 98/42832 by Arnold et al., “Recombination of Polynucleotide Sequences Using Random or Defined Primers,” WO 99/29902 by Arnold et al., “Method for Creating Polynucleotide and Polypeptide Sequences,” WO 98/41653 by Vind, “An in Vitro Method for Construction of a DNA Library,” WO 98/41622 by Borchert et al., “Method for Constructing a Library Using DNA Shuffling,” and WO 98/42727 by Pati and Zarling, “Sequence Alterations using Homologous Recombination;” WO 00/18906 by Patten et al., “Shuffling of Codon-Altered Genes;” WO 00/04190 by del Cardayre et al. “Evolution of Whole Cells and Organisms by Recursive Recombination;” WO 00/42561 by Crameri et al., “Oligonucleotide Mediated Nucleic Acid Recombination;” WO 00/42559 by Selifonov and Stemmer “Methods of Populating Data Structures for Use in Evolutionary Simulations;” WO 00/42560 by Selifonov et al., “Methods for Making Character Strings, Polynucleotides & Polypeptides Having Desired Characteristics;” WO 01/23401 by Welch et al., “Use of Codon-Varied Oligonucleotide Synthesis for Synthetic Shuffling;” and PCT/US01/06775 “Single-Stranded Nucleic Acid Template-Mediated Recombination and Nucleic Acid Fragment Isolation” by Affholter.

[0377] Another aspect of the present invention includes the cloning and expression of monomer domains, selected monomer domains, multimers and/or selected multimers coding nucleic acids. Thus, multimer domains can be synthesized as a single protein using expression systems well known in the art. In addition to the many texts noted above, general texts which describe molecular biological techniques useful herein, including the use of vectors, promoters and many other topics relevant to expressing nucleic acids such as monomer domains, selected monomer domains, multimers and/or selected multimers, include Berger and Kimmel, Guide to Molecular Cloning Techniques, Methods in Enzymology volume 152 Academic Press, Inc., San Diego, Calif. (Berger); Sambrook et al., Molecular Cloning—A Laboratory Manual (2nd Ed.), Vol. 1-3, Cold Spring Harbor Laboratory, Cold Spring Harbor, N.Y., 1989 (“Sambrook”) and Current Protocols in Molecular Biology, F. M. Ausubel et al., eds., Current Protocols, a joint venture between Greene Publishing Associates, Inc. and John Wiley & Sons, Inc., (supplemented through 1999) (“Ausubel”)). Examples of techniques sufficient to direct persons of skill through in vitro amplification methods, useful in identifying, isolating and cloning monomer domains and multimers coding nucleic acids, including the polymerase chain reaction (PCR) the ligase chain reaction (LCR), Q-replicase amplification and other RNA polymerase mediated techniques (e.g., NASBA), are found in Berger, Sambrook, and Ausubel, as well as Mullis et al., (1987) U.S. Pat. No. 4,683,202; PCR Protocols A Guide to Methods and Applications (Innis et al. eds) Academic Press Inc. San Diego, Calif. (1990) (Innis); Arnheim & Levinson (Oct. 1, 1990) C&EN 36-47; The Journal Of NIH Research (1991) 3, 81-94; (Kwoh et al. (1989) Proc. Natl. Acad. Sci. USA 86, 1173; Guatelli et al. (1990) Proc. Natl. Acad. Sci. USA 87, 1874; Lomell et al. (1989) J. Clin. Chem 35, 1826; Landegren et al., (1988) Science 241, 1077-1080; Van Brunt (1990) Biotechnology 8, 291-294; Wu and Wallace, (1989) Gene 4, 560; Barringer et al. (1990) Gene 89, 117, and Sooknanan and Malek (1995) Biotechnology 13:563-564. Improved methods of cloning in vitro amplified nucleic acids are described in Wallace et al., U.S. Pat. No. 5,426,039. Improved methods of amplifying large nucleic acids by PCR are summarized in Cheng et al. (1994) Nature 369:684-685 and the references therein, in which PCR amplicons of up to 40 kb are generated. One of skill will appreciate that essentially any RNA can be converted into a double stranded DNA suitable for restriction digestion, PCR expansion and sequencing using reverse transcriptase and a polymerase. See, Ausubel, Sambrook and Berger, all supra.

[0378] The present invention also relates to the introduction of vectors of the invention into host cells, and the production of monomer domains, selected monomer domains immuno-domains, multimers and/or selected multimers of the invention by recombinant techniques. Host cells are genetically engineered (i.e., transduced, transformed or transfected) with the vectors of this invention, which can be, for example, a cloning vector or an expression vector. The vector can be, for example, in the form of a plasmid, a viral particle, a phage, etc. The engineered host cells can be cultured in conventional nutrient media modified as appropriate for activating promoters, selecting transformants, or amplifying the monomer domain, selected monomer domain, multimer and/or selected multimer gene(s) of interest. The culture conditions, such as temperature, pH and the like, are those previously used with the host cell selected for expression, and will be apparent to those skilled in the art and in the references cited herein, including, e.g., Freshney (1994) Culture of Animal Cells, a Manual of Basic Technique, third edition, Wiley-Liss, New York and the references cited therein.

[0379] As mentioned above, the polypeptides of the invention can also be produced in non-animal cells such as plants, yeast, fungi, bacteria and the like. Indeed, as noted throughout, phage display is an especially relevant technique for producing such polypeptides. In addition to Sambrook, Berger and Ausubel, details regarding cell culture can be found in Payne et al. (1992) Plant Cell and Tissue Culture in Liquid Systems John Wiley & Sons, Inc. New York, N.Y.; Gamborg and Phillips (eds) (1995) Plant Cell, Tissue and Organ Culture; Fundamental Methods Springer Lab Manual, Springer-Verlag (Berlin Heidelberg New York) and Atlas and Parks (eds) The Handbook of Microbiological Media (1993) CRC Press, Boca Raton, Fla.

[0380] The present invention also includes alterations of monomer domains, immuno-domains and/or multimers to improve pharmacological properties, to reduce immunogenicity, or to facilitate the transport of the multimer and/or monomer domain into a cell or tissue (e.g., through the blood-brain barrier, or through the skin). These types of alterations include a variety of modifications (e.g., the addition of sugar-groups or glycosylation), the addition of PEG, the addition of protein domains that bind a certain protein (e.g., HSA or other serum protein), the addition of proteins fragments or sequences that signal movement or transport into, out of and through a cell. Additional components can also be added to a multimer and/or monomer domain to manipulate the properties of the multimer and/or monomer domain. A variety of components can also be added including, e.g., a domain that binds a known receptor (e.g., a Fc-region protein domain that binds a Fc receptor), a toxin(s) or part of a toxin, a prodomain that can be optionally cleaved off to activate the multimer or monomer domain, a reporter molecule (e.g., green fluorescent protein), a component that bind a reporter molecule (such as a radionuclide for radiotherapy, biotin or avidin) or a combination of modifications.

[0381] 6. Animal Models

[0382] Another aspect of the invention is the development of specific non-human animal models in which to test the immunogenicity of the monomer or multimer domains. The method of producing such non-human animal model comprises: introducing into at least some cells of a recipient non-human animal, vectors comprising genes encoding a plurality of human proteins from the same family of proteins, wherein the genes are each operably linked to a promoter that is functional in at least some of the cells into which the vectors are introduced such that a genetically modified non-human animal is obtained that can express the plurality of human proteins from the same family of proteins.

[0383] Suitable non-human animals employed in the practice of the present invention include all vertebrate animals, except humans (e.g., mouse, rat, rabbit, sheep, and the like). Typically, the plurality of members of a family of proteins includes at least two members of that family, and usually at least ten family members. In some embodiments, the plurality includes all known members of the family of proteins. Exemplary genes that can be used include those encoding monomer domains, such as, for example, members of the LDL receptor class A-domain family, the EGF-like domain family, as well as the other domain families described herein.

[0384] The non-human animal models of the present invention can be used to screen for immunogenicity of a monomer or multimer domain that is derived from the same family of proteins expressed by the non-human animal model. The present invention includes the non-human animal model made in accordance with the method described above, as well as transgenic non-human animals whose somatic and germ cells contain and express DNA molecules encoding a plurality of human proteins from the same family of proteins (such as the monomer domains described herein), wherein the DNA molecules have been introduced into the transgenic non-human animal at an embryonic stage, and wherein the DNA molecules are each operably linked to a promoter in at least some of the cells in which the DNA molecules have been introduced.

[0385] An example of a mouse model useful for screening LDL receptor class A-domain derived binding proteins is described as follows. Gene clusters encoding the wild type human LDL receptor class A-domain monomers are amplified from human cells using PCR. Almost all of the 200 different A-domains can be amplified with only three separate PCR amplification reactions of about 7 kb each. These fragments are then used to generate transgenic mice according to the method described above. The transgenic mice will recognize the human A-domains as “self”, thus mimicking the “selfness” of a human with regard to A-domains. Individual A-domain-derived monomers or multimers are tested in these mice by injecting the A-domain-derived monomers or multimers into the mice, then analyzing the immune response (or lack of response) generated. The mice are tested to determine if they have developed a mouse anti-human response (MAHR). Monomers and multimers that do not result in the generation of a MAHR are likely to be non-immunogenic when administered to humans.

[0386] Historically, MAHR test in transgenic mice is used to test individual proteins in mice that are transgenic for that single protein. In contrast, the above described method provides a non-human animal model that recognizes an entire family of human proteins as “self,” and that can be used to evaluate a huge number of variant proteins that each are capable of vastly varied binding activities and uses.

[0387] 7. Kits

[0388] Kits comprising the components needed in the methods (typically in an unmixed form) and kit components (packaging materials, instructions for using the components and/or the methods, one or more containers (reaction tubes, columns, etc.)) for holding the components are a feature of the present invention. Kits of the present invention may contain a multimer library, or a single type of multimer. Kits can also include reagents suitable for promoting target molecule binding, such as buffers or reagents that facilitate detection, including detectably-labeled molecules. Standards for calibrating a ligand binding to a monomer domain or the like, can also be included in the kits of the invention.

[0389] The present invention also provides commercially valuable binding assays and kits to practice the assays. In some of the assays of the invention, one or more ligand is employed to detect binding of a monomer domain, immuno-domains and/or multimer. Such assays are based on any known method in the art, e.g., flow cytometry, fluorescent microscopy, plasmon resonance, and the like, to detect binding of a ligand(s) to the monomer domain and/or multimer.

[0390] Kits based on the assay are also provided. The kits typically include a container, and one or more ligand. The kits optionally comprise directions for performing the assays, additional detection reagents, buffers, or instructions for the use of any of these components, or the like. Alternatively, kits can include cells, vectors, (e.g., expression vectors, secretion vectors comprising a polypeptide of the invention), for the expression of a monomer domain and/or a multimer of the invention.

[0391] In a further aspect, the present invention provides for the use of any composition, monomer domain, immuno-domain, multimer, cell, cell culture, apparatus, apparatus component or kit herein, for the practice of any method or assay herein, and/or for the use of any apparatus or kit to practice any assay or method herein and/or for the use of cells, cell cultures, compositions or other features herein as a therapeutic formulation. The manufacture of all components herein as therapeutic formulations for the treatments described herein is also provided.

[0392] 8. Integrated Systems

[0393] The present invention provides computers, computer readable media and integrated systems comprising character strings corresponding to monomer domains, selected monomer domains, multimers and/or selected multimers and nucleic acids encoding such polypeptides. These sequences can be manipulated by in silico recombination methods, or by standard sequence alignment or word processing software.

[0394] For example, different types of similarity and considerations of various stringency and character string length can be detected and recognized in the integrated systems herein. For example, many homology determination methods have been designed for comparative analysis of sequences of biopolymers, for spell checking in word processing, and for data retrieval from various databases. With an understanding of double-helix pair-wise complement interactions among 4 principal nucleobases in natural polynucleotides, models that simulate annealing of complementary homologous polynucleotide strings can also be used as a foundation of sequence alignment or other operations typically performed on the character strings corresponding to the sequences herein (e.g., word-processing manipulations, construction of figures comprising sequence or subsequence character strings, output tables, etc.). An example of a software package with GOs for calculating sequence similarity is BLAST, which can be adapted to the present invention by inputting character strings corresponding to the sequences herein.

[0395] BLAST is described in Altschul et al., (1990) J. Mol. Biol. 215:403-410. Software for performing BLAST analyses is publicly available through the National Center for Biotechnology Information (available on the World Wide Web at ncbi.nlm.nih.gov). This algorithm involves first identifying high scoring sequence pairs (HSPs) by identifying short words of length W in the query sequence, which either match or satisfy some positive-valued threshold score T when aligned with a word of the same length in a database sequence. T is referred to as the neighborhood word score threshold (Altschul et al., supra). These initial neighborhood word hits act as seeds for initiating searches to find longer HSPs containing them. The word hits are then extended in both directions along each sequence for as far as the cumulative alignment score can be increased. Cumulative scores are calculated using, for nucleotide sequences, the parameters M (reward score for a pair of matching residues; always >0) and N (penalty score for mismatching residues; always <0). For amino acid sequences, a scoring matrix is used to calculate the cumulative score. Extension of the word hits in each direction are halted when: the cumulative alignment score falls off by the quantity X from its maximum achieved value; the cumulative score goes to zero or below, due to the accumulation of one or more negative-scoring residue alignments; or the end of either sequence is reached. The BLAST algorithm parameters W, T, and X determine the sensitivity and speed of the alignment. The BLASTN program (for nucleotide sequences) uses as defaults a wordlength (W) of 11, an expectation (E) of 10, a cutoff of 100, M=5, N=−4, and a comparison of both strands. For amino acid sequences, the BLASTP program uses as defaults a wordlength (W) of 3, an expectation (E) of 10, and the BLOSUM62 scoring matrix (see Henikoff & Henikoff (1989) Proc. Natl. Acad. Sci. USA 89:10915).

[0396] An additional example of a useful sequence alignment algorithm is PILEUP. PILEUP creates a multiple sequence alignment from a group of related sequences using progressive, pairwise alignments. It can also plot a tree showing the clustering relationships used to create the alignment. PILEUP uses a simplification of the progressive alignment method of Feng & Doolittle, (1987) J. Mol. Evol. 35:351-360. The method used is similar to the method described by Higgins & Sharp, (1989) CABIOS 5:151-153. The program can align, e.g., up to 300 sequences of a maximum length of 5,000 letters. The multiple alignment procedure begins with the pairwise alignment of the two most similar sequences, producing a cluster of two aligned sequences. This cluster can then be aligned to the next most related sequence or cluster of aligned sequences. Two clusters of sequences can be aligned by a simple extension of the pairwise alignment of two individual sequences. The final alignment is achieved by a series of progressive, pairwise alignments. The program can also be used to plot a dendogram or tree representation of clustering relationships. The program is run by designating specific sequences and their amino acid or nucleotide coordinates for regions of sequence comparison. For example, in order to determine conserved amino acids in a monomer domain family or to compare the sequences of monomer domains in a family, the sequence of the invention, or coding nucleic acids, are aligned to provide structure-function information.

[0397] In one aspect, the computer system is used to perform “in silico” sequence recombination or shuffling of character strings corresponding to the monomer domains. A variety of such methods are set forth in “Methods For Making Character Strings, Polynucleotides & Polypeptides Having Desired Characteristics” by Selifonov and Stemmer, filed Feb. 5, 1999 (U.S. Ser. No. 60/118854) and “Methods For Making Character Strings, Polynucleotides & Polypeptides Having Desired Characteristics” by Selifonov and Stemmer, filed Oct. 12, 1999 (U.S. Ser. No. 09/416,375). In brief, genetic operators are used in genetic algorithms to change given sequences, e.g., by mimicking genetic events such as mutation, recombination, death and the like. Multi-dimensional analysis to optimize sequences can be also be performed in the computer system, e.g., as described in the '375 application.

[0398] A digital system can also instruct an oligonucleotide synthesizer to synthesize oligonucleotides, e.g., used for gene reconstruction or recombination, or to order oligonucleotides from commercial sources (e.g., by printing appropriate order forms or by linking to an order form on the Internet).

[0399] The digital system can also include output elements for controlling nucleic acid synthesis (e.g., based upon a sequence or an alignment of a recombinant, e.g., recombined, monomer domain as herein), i.e., an integrated system of the invention optionally includes an oligonucleotide synthesizer or an oligonucleotide synthesis controller. The system can include other operations that occur downstream from an alignment or other operation performed using a character string corresponding to a sequence herein, e.g., as noted above with reference to assays.

### EXAMPLES

[0400] The following example is offered to illustrate, but not to limit the claimed invention.

### Example 1

[0401] This example describes selection of monomer domains and the creation of multimers.

[0402] Starting materials for identifying monomer domains and creating multimers from the selected monomer domains and procedures can be derived from any of a variety of human and/or non-human sequences. For example, to produce a selected monomer domain with specific binding for a desired ligand or mixture of ligands, one or more monomer domain gene(s) are selected from a family of monomer domains that bind to a certain ligand. The nucleic acid sequences encoding the one or more monomer domain gene can be obtained by PCR amplification of genomic DNA or cDNA, or optionally, can be produced synthetically using overlapping oligonucleotides.

[0403] Most commonly, these sequences are then cloned into a cell surface display format (i.e., bacterial, yeast, or mammalian (COS) cell surface display; phage display) for expression and screening. The recombinant sequences are transfected (transduced or transformed) into the appropriate host cell where they are expressed and displayed on the cell surface. For example, the cells can be stained with a labeled (e.g., fluorescently labeled), desired ligand. The stained cells are sorted by flow cytometry, and the selected monomer domains encoding genes are recovered (e.g., by plasmid isolation, PCR or expansion and cloning) from the positive cells. The process of staining and sorting can be repeated multiple times (e.g., using progressively decreasing concentrations of the desired ligand until a desired level of enrichment is obtained). Alternatively, any screening or detection method known in the art that can be used to identify cells that bind the desired ligand or mixture of ligands can be employed.

[0404] The selected monomer domain encoding genes recovered from the desired ligand or mixture of ligands binding cells can be optionally recombined according to any of the methods described herein or in the cited references. The recombinant sequences produced in this round of diversification are then screened by the same or a different method to identify recombinant genes with improved affinity for the desired or target ligand. The diversification and selection process is optionally repeated until a desired affinity is obtained.

[0405] The selected monomer domain nucleic acids selected by the methods can be joined together via a linker sequence to create multimers, e.g., by the combinatorial assembly of nucleic acid sequences encoding selected monomer domains by DNA ligation, or optionally, PCR-based, self-priming overlap reactions. The nucleic acid sequences encoding the multimers are then cloned into a cell surface display format (i.e., bacterial, yeast, or mammalian (COS) cell surface display; phage display) for expression and screening. The recombinant sequences are transfected (transduced or transformed) into the appropriate host cell where they are expressed and displayed on the cell surface. For example, the cells can be stained with a labeled, e.g., fluorescently labeled, desired ligand or mixture of ligands. The stained cells are sorted by flow cytometry, and the selected multimers encoding genes are recovered (e.g., by PCR or expansion and cloning) from the positive cells. Positive cells include multimers with an improved avidity or affinity or altered specificity to the desired ligand or mixture of ligands compared to the selected monomer domain(s). The process of staining and sorting can be repeated multiple times (e.g., using progressively decreasing concentrations of the desired ligand or mixture of ligands until a desired level of enrichment is obtained). Alternatively, any screening or detection method known in the art that can be used to identify cells that bind the desired ligand or mixture of ligands can be employed.

[0406] The selected multimer encoding genes recovered from the desired ligand or mixture of ligands binding cells can be optionally recombined according to any of the methods described herein or in the cited references. The recombinant sequences produced in this round of diversification are then screened by the same or a different method to identify recombinant genes with improved avidity or affinity or altered specificity for the desired or target ligand. The diversification and selection process is optionally repeated until a desired avidity or affinity or altered specificity is obtained.

### Example 2

[0407] This example describes the selection of monomer domains that are capable of binding to Human Serum Albumin (HSA).

[0408] For the production of phages, E. coli DH10B cells (Invitrogen) were transformed with phage vectors encoding a library of LDL receptor class A-domain variants as a fusions to the pIII phage protein. To transform these cells, the electroporation system MicroPulser (Bio-Rad) was used together with cuvettes provided by the same manufacturer. The DNA solution was mixed with 100 μl of the cell suspension, incubated on ice and transferred into the cuvette (electrode gap 1 mm). After pulsing, 2 ml of SOC medium (2% w/v tryptone, 0.5% w/v yeast extract, 10 mM NaCl, 10 mM MgSO₄, 10 mM MgCl₂) were added and the transformation mixture was incubated at 37 C for 1 h. Multiple transformations were combined and diluted in 500 ml 2×YT medium containing 20 μg/m tetracycline and 2 mM CaCl₂. With 10 electroporations using a total of 10 μg ligated DNA 1.2×10⁸ independent clones were obtained.

[0409] 160 ml of the culture, containing the cells which were transformed with the phage vectors encoding the library of the A-domain variant phages, were grown for 24 h at 22 C, 250 rpm and afterwards transferred in sterile centrifuge tubes. The cells were sedimented by centrifugation (15 minutes, 5000 g, 4° C.). The supernatant containing the phage particles was mixed with ⅕ volumes 20% w/v PEG 8000, 15% w/v NaCl, and was incubated for several hours at 4° C. After centrifugation (20 minutes, 10000 g, 4° C.) the precipitated phage particles were dissolved in 2 ml of cold TBS (50 mM Tris, 100 mM NaCl, pH 8.0) containing 2 mM CaCl₂. The solution was incubated on ice for 30 minutes and was distributed into two 1.5 ml reaction vessels. After centrifugation to remove undissolved components (5 minutes, 18500 g, 4° C.) the supernatants were transferred to a new reaction vessel. Phage were reprecipitated by adding ⅕ volumes 20% w/v PEG 8000, 15% w/v NaCl and incubation for 60 minutes on ice. After centrifugation (30 minutes, 18500 g, 4° C.) and removal of the supernatants, the precipitated phage particles were dissolved in a total of 1 ml TBS containing 2 mM CaCl₂. After incubation for 30 minutes on ice the solution was centrifuged as described above. The supernatant containing the phage particles was used directly for the affinity enrichment.

[0410] Affinity enrichment of phage was performed using 96 well plates (Maxisorp, NUNC, Denmark). Single wells were coated for 12 h at RT by incubation with 150 μl of a solution of 100 μg/ml human serum albumin (HSA, Sigma) in TBS. Binding sites remaining after HSA incubation were saturated by incubation with 250 μl 2% w/v bovine serum albumin (BSA) in TBST (TBS with 0.1% v/v Tween 20) for 2 hours at RT. Afterwards, 40 μl of the phage solution, containing approximately 5×10¹¹ phage particles, were mixed with 80 μl TBST containing 3% BSA and 2 mM CaCl₂ for 1 hour at RT. In order to remove non binding phage particles, the wells were washed 5 times for 1 min using 130 μl TBST containing 2 mM CaCl₂.

[0411] Phage bound to the well surface were eluted either by incubation for 15 minutes with 130 μl 0.1 M glycine/HCl pH 2.2 or in a competitive manner by adding 130 μl of 500 μg/ml HSA in TBS. In the first case, the pH of the elution fraction was immediately neutralized after removal from the well by mixing the eluate with 30 μl 1 M Tris/HCl pH 8.0.

[0412] For the amplification of phage, the eluate was used to infect E. coli K91BluKan cells (F⁺). 50 μl of the eluted phage solution were mixed with 50 μl of a preparation of cells and incubated for 10 minutes at RT. Afterwards, 20 ml LB medium containing 20 μg/ml tetracycline were added and the infected cells were grown for 36 h at 22 C, 250 rpm. Afterwards, the cells were sedimented (10 minutes, 5000 g, 4° C.). Phage were recovered from the supernatant by precipitation as described above. For the repeated affinity enrichment of phage particles the same procedure as described in this example was used. After two subsequent rounds of panning against HSA, random colonies were picked and tested for their binding properties against the used target protein.

### Example 3

[0413] This example describes the determination of biological activity of monomer domains that are capable of binding to HSA.

[0414] In order to show the ability of an HSA binding domain to extend the serum half life of an protein in vivo, the following experimental setup was performed. A multimeric A-domain, consisting of an A-domain which was evolved for binding HSA (see Example 2) and a streptavidin binding A-domain was compared to the streptavidin binding A-domain itself. The proteins were injected into mice, which were either loaded or not loaded (as control) with human serum albumin (HSA). Serum levels of a-domain proteins were monitored.

[0415] Therefore, an A-domain, which was evolved for binding HSA (see Example 1) was fused on the genetic level with a streptavidin binding A-domain multimer using standard molecular biology methods (see Maniatis et al.). The resulting genetic construct, coding for an A-domain multimer as well as a hexahistidine tag and a HA tag, were used to produce protein in E. coli. After refolding and affinity tag mediated purification the proteins were dialysed several times against 150 mM NaCl, 5 mM Tris pH 8.0, 100 μM CaCl₂ and sterile filtered (0.45 μM).

[0416] Two sets of animal experiments were performed. In a first set, 1 ml of each prepared protein solution with a concentration of 2.5 μM were injected into the tail vein of separate mice and serum samples were taken 2, 5 and 10 minutes after injection. In a second set, the protein solution described before was supplemented with 50 mg/ml human serum albumin. As described above, 1 ml of each solution was injected per animal. In case of the injected streptavidin binding A-domain dimer, serum samples were taken 2, 5 and 10 minutes after injection, while in case of the trimer, serum samples were taken after 10, 30 and 120 minutes. All experiments were performed as duplicates and individual animals were assayed per time point.

[0417] In order to detect serum levels of A-domains in the serum samples, an enzyme linked immunosorbent assay (ELISA) was performed. Therefore, wells of a maxisorp 96 well microtiter plate (NUNC, Denmark) were coated with each 1 μg anti-His₆-antibody in TBS containing 2 mM CaCl₂ for 1 h at 4 C. After blocking remaining binding sites with casein (Sigma) solution for 1 h, wells were washed three times with TBS containing 0.1% Tween and 2 mM CaCl₂. Serial concentration dilutions of the serum samples were prepared and incubated in the wells for 2 h in order to capture the a-domain proteins. After washing as before, anti-HA-tag antibody coupled to horse radish peroxidase (HRP) (Roche Diagnostics, 25 μg/ml) was added and incubated for 2 h. After washing as described above, HRP substrate (Pierce) was added and the detection reaction developed according to the instructions of the manufacturer. Light absorption, reflecting the amount of a-domain protein present in the serum samples, was measured at a wavelength of 450 nm. Obtained values were normalized and plotted against a time scale.

[0418] Evaluation of the obtained values showed a serum half life for the streptavidin binding A-domain of about 4 minutes without presence of HSA respectively 5.2 minutes when the animal was loaded with HSA. The trimer of A-domains, which contained the HSA binding A-domain, exhibited a serum half life of 6.3 minutes without the presence of HSA but a significantly increased half life of 38 minutes when HSA was present in the animal. This clearly indicates that the HSA binding A-domain can be used as a fusion partner to increase the serum half life of any protein, including protein therapeuticals.

### Example 4

[0419] This example describes experiments demonstrating extension of half-life of proteins in blood.

[0420] To further demonstrate that blood half-life of proteins can be extended using monomer domains of the invention, individual monomer domain proteins selected against monkey serum albumin, human serum albumin, human IgG, and human red blood cells were added to aliquots of whole, heparinized human or monkey blood.

[0421] The following list provides sequences of monomer domains analyzed in this example.

1G156
CLSSEFQCQSSGRCIPLAWVCDGDNDCRDDSDEKSCKPRT
RBCA
CRSSQFQCNDSRICIPGRWRCDGDNDCQDGSDETGCGDSHILPFSTPG
PST
RBCB
CPAGEFPCKNGQCLPVTWLCDGVNDCLDGSDEKGCGRPGPGATSAPAA
RBC11
CPPDEFPCKNGQCIPQDWLCDGVNDCLDGSDEKDCGRPGPGATSAPAA
CSA-A8
CGAGQFPCKNGHCLPLNLLCDGVNDCEDNSDEPSELCKALT

[0422] Blood aliquots containing monomer protein were then added to individual dialysis bags (25,000 MWCO), sealed, and stirred in 4 L of Tris-buffered saline at room temperature overnight.

[0423] Anti-6×His antibody was immobilized by hydrophobic interaction to a 96-well plate (Nunc). Serial dilutions of serum from each blood sample were incubated with the immobilized antibody for 3 hours. Plates were washed to remove unbound protein and probed with α-HA-HRP to detect monomer.

[0424] Monomers identified as having long half-lives in dialysis experiments were constructed to contain either an HA, FLAG, E-Tag, or myc epitope tag. Four monomers were pooled, containing one protein for each tag, to make two pools.

[0425] One monkey was injected subcutaneously per pool, at a dose of 0.25 mg/kg/monomer in 2.5 mL total volume in saline. Blood samples were drawn at 24, 48, 96, and 120 hours. Anti-6×His antibody was immobilized by hydrophobic interaction to a 96-well plate (Nunc). Serial dilutions of serum from each blood sample were incubated with the immobilized antibody for 3 hours. Plates were washed to remove unbound protein and separately probed with α-HA-HRP, α-FLAG-HRP, α-ETag-HRP, and α-myc-HRP to detect the monomer.

### Example 5

[0426] This example describes the determination of biological activity of monomer domains that are capable of binding to CD40L.

[0427] An LDL receptor class A-domain library was screened for monomers capable of binding CD40L using the same screening methods as described above in Example 2, except that recombinant CD40L was used as the target and no competitive elution steps were performed. In order to determine the biological activity of the selected A-domains, proteins were produced in E. coli as inclusion bodies or soluble protein. Biological activity of affinity-tag purified A-domain proteins with binding affinity to CD40L was measured by inhibition of rsCD40L stimulated B cell proliferation. Therefore, B cells were stimulated with Interleukin 4 (IL-4, R&D systems, Minneapolis, Minn.) and recombinant soluble CD40L (rsCD40L, Peprotech, Rocky Hill, N.J.), and incorporation of Tritium-labeled thymidine was measured.

[0428] B cells were enriched from buffy coats of a healthy donor by gradient centrifugation and further purified by FACS. For a typical assay, B cells were transferred to a 96 well microtiter plate (100000 cells per well), and incubated for 3 days in appropriate tissue culture medium with IL-4 (100 μg/ml), rsCD40L (10 μg/ml) as well as different concentrations of selected a-domain variants. During the final 8 hours of incubation, the cultures were pulsed with 1 μCi/well of ³H thymidine (ICN) and the incorporation afterwards measured in a scintillation counter.

[0429] Selected A-domains with binding affinity to CD40L were able to inhibit rsCD40L induced B cell stimulation as shown by lowered thymidine incorporation in B cells that were incubated with the A-domains.

### Example 6

[0430] This example describes the development of a library of multimers comprised of C2 domains.

[0431] A library of DNA sequences encoding monomeric C2 domains is created by assembly PCR as described in Stemmer et al., Gene 164, 49-53 (1995). The oligonucleotides used in this PCR reaction are (SEQ ID NOS: 211-223, respectively, in order of appearance):

5′ -acactgcaatcgcgccttacggctCCCGGGCGGATCCtcccataagttca
5′ -agctaccaaagtgacannknnknnknnknnknnknnknnknnknnknnknnkccatacgtcgaattgttcat
5′ -agctaccaaagtgacaaaaggtgcttttggtgatatgttggatactccagatccatacgtcgaattgttcat
5′ -taggaagagaacacgtcattttnnknnknnkattaaccctgtttggaacgagacctttgagt
5′ -taggaagagaacacgtcattttaataatgatattaaccctgtttggaacgagacctttgagt
5′ -ttggaaatcaccctaatgnnknnknnknnknnknnknnknnkactctaggtacagcaa
5′ -ttggaaatcaccctaatggatgcaaattatgttatggacgaaactctaggtacagcaa
5′ -aagaaggaagtcccatttattttcaatcaagttactgaaatggtcttagagatgtccctt
5′ -tgtcactttggtagctcttaacacaactacagtgaacttatgggaGGA
5′ -acgtgttctcttcctagaatctggagttgtactgatgaacaattcgacgta
5′ -attagggtgatttccaaaacattttcttgattaggatctaatataaactcaaaggtctcgtt
5′ -atgggacttccttcttttctcccactttcattgaagatacagtaaacgttgctgtacctagagt
5′ -gaccgatagcttgccgattgcagtgtGGCCACAGAGGCCTCGAGaacttcaagggacatctctaaga

[0432] PCR fragments are digested with BamHI and XhoI. Digestion products are separated on 1.5% agarose gel and C2 domain fragments are purified from the gel. The DNA fragments are ligated into the corresponding restriction sites of yeast surface display vector pYD1 (Invitrogen).

[0433] The ligation mixture is used for transformation of yeast strain EBY100. Transformants are selected by growing the cells in glucose-containing selective medium (−Trp) at 30° C.

[0434] Surface display of the C2 domain library is induced by growing the cells in galactose-containing selective medium at 20° C. Cells are rinsed with PBS and then incubated with fluorescently-labeled target protein and rinsed again in PBS.

[0435] Cells are then sorted by FACS and positive cells are regrown in glucose-containing selective medium. The cell culture may be used for a second round of sorting or may be used for isolation of plasmid DNA. Purified plasmid DNA is used as a template to PCR amplify C2 domain encoding DNA sequences.

[0436] The oligonucleotides used in this PCR reaction are (SEQ ID NOS: 224-225, respectively, in order of appearance):

5′ -acactgcaatcgcgccttacggctCAGgtgCTGgtggttcccataagttcactgta
5′ -gaccgatagcttgccgattgcagtCAGcacCTGaaccaccaccaccagaaccaccaccaccaacttcaa
gggacatctcta
(linker sequence is underlined).

[0437] PCR fragments are then digested with AlwNI, digestion products are separated on 1.5% agarose gel and C2 domain fragments are purified from the gel. Subsequently, PCR fragments are multimerized by DNA ligation in the presence of stop fragments. The stop fragments are listed below:

| | |
|---|---|
| Stop 1: | |
| 5′ -gaattcaacgctactaccattagtagaattgatgccaccttttcagctcgcgccccaaat | (SEQ ID NO: 226) |
| gaaaaaatggtcaaactaaatctactcgttcgcagaattgggaatcaactgttacatggaatgaaacttccagac | |
| accgtactttatgaatatttatgacgattccgaggcgcgcccggactacccgtatgatgttccggattatgcccc | |
| gggatcctcaggtgctg-3′ | |
| (digested with EcoRI and AlwNI). | |
| Stop2: | |
| 5′ - caggtgctgcactcgaggccactgcggccgcatattaacgtagatttttcctccc | (SEQ ID NO: 227) |
| aacgtcctgactggtataatgagccagttcttaaaatcgcataaccagtacatggtgattaaagttgaaattaaa | |
| ccgtctcaagagctttgttacgttgatttgggtaatgaagctt-3′ | |
| (digested with AlwNI and HindIII). | |

[0438] The ligation mixture is then digested with EcoRI and HindIII.

[0439] Multimers are separated on 1% agarose gel and DNA fragments corresponding to stop1-C2-C2-stop2 are purified from the gel. Stop1-C2-C2-stop2 fragments are PCR amplified using primers 5′ aattcaacgctactaccat-3′ (SEQ ID NO:242) and 5′-agcttcattacccaaatcaac-3′ (SEQ ID NO:243) and subsequently digested with BamHI and XhoI. Optionally, the polynucleotides encoding the multimers can be put through a further round of affinity screening (e.g., FACS analysis as described above).

[0440] Subsequently, high affinity binders are isolated and sequenced. DNA encoding the high binders is cloned into expression vector and replicated in a suitable host. Expressed proteins are purified and characterized.

### Example 7

[0441] This example describes the development of a library of trimers comprised of LDL receptor A domains.

[0442] A library of DNA sequences encoding monomeric A domains is created by assembly PCR as described in Stemmer et al., Gene 164, 49-53 (1995). The oligonucleotides used in this PCR reaction are (SEQ ID NOS: 228-235, respectively, in order of appearance):

5′ -CACTATGCATGGACTCAGTGTGTCCGATAAGGGCACACGGTGCCTACCCGTATGATGTTCCGGATTATGCC
CCGGGCAGTA
5′ -CGCCGTCGCATMSCMAGYKCNSAGRAATACAWYGGCCGYTWYYGCACBKAAATTSGYYAGVCNSACAGGTA
CTGCCCGGGGCAT
5′ -CGCCGTCGCATMSCMATKCCNSAGRAATACAWYGGCCGYTWYYGCACBKAAATTSGYYAGVCNSACAGGTA
CTGCCCGGGGCAT
5′ -ATGCGACGGCGWWRATGATTGTSVAGATGGTAGCGATGAAVWGRRTTGTVMAVNMVNMVGCCVTACGGGCT
CGGCCTCT
5′ -ATGCGACGGCGWWCCGGATTGTSVAGATGGTAGCGATGAAVWGRRTTGTVMAVNMVNMVGCCVTACGGGCT
CGGCCTCT
5′ -ATGCGACGGCGWWRATGATTGTSVAGATAACAGCGATGAAVWGRRTTGTVMAVNMVNMVGCCVTACGGGCT
CGGCCTCT
5′ -ATGCGACGGCGWWCCGGATTGTSVAGATAACAGCGATGAAVWGRRTTGTVMAVNMVNMVGCCVTACGGGCT
CGGCCTCT
5′ -TCCTGGTAGTACTTATCTACTACTATTTGTCTGTGTCTGCTCTGGGTTCCTAACGGTTCGGCCACAGAGGC
CGAGCCCGTA

where R=A/G, Y=C/T, M=A/C, K=G/T, S=C/G, W=A/T, B=C/G/T, D=A/G/T, H=A/C/T, V=A/C/G, and N=A/C/G/T.

[0444] PCR fragments are digested with XmaI and SfiI. Digestion products are separated on 3% agarose gel and A domain fragments are purified from the gel. The DNA fragments are then ligated into the corresponding restriction sites of phage display vector fuse5-HA, a derivative of fuse5. The ligation mixture is electroporated into electrocompetent E. coli cells (F-strain e.g. Top10 or MC1061). Transformed E. coli cells are grown overnight in 2×YT medium containing 20 μg/ml tetracycline.

[0445] Virions are purified from this culture by PEG-precipitation. Target protein is immobilized on solid surface (e.g. Petri dish or microtiter plate) directly by incubating in 0.1 M NaHCO₃ or indirectly via a biotin-streptavidin linkage. Purified virions are added at a typical number of 1-3×10¹¹ TU. The Petri dish or microtiter plate is incubated at 4° C., washed several times with washing buffer (TBS/Tween) and bound phages are eluted by adding glycine-HCl buffer. The eluate is neutralized by adding 1 M Tris-HCl (pH 9.1)

[0446] The phages are amplified and subsequently used as input to a second round of affinity selection. ssDNA is extracted from the final eluate using QIAprep M13 kit. ssDNA is used as a template to PCR amplify A domains encoding DNA sequences.

[0447] The oligonucleotides used in this PCR reaction are:

| | |
|---|---|
| 5′-aagcctcagcgaccgaa | (SEQ ID NO: 236) |
| 5′-agcccaataggaacccat | (SEQ ID NO: 237) |

[0448] PCR fragments are digested with AlwNI and BglI. Digestion products are separated on 3% agarose gel and A domain fragments are purified from the gel. PCR fragments are multimerized by DNA ligation in the presence of the following stop fragments:

| | |
|---|---|
| Stop1: | |
| 5′ -gaattcaacgctactaccattagtagaattgatgccaccttttcagctcgcgccccaaatgaaaaaatggt | (SEQ ID NO: 238) |
| caaactaaatctactcgttcgcagaattgggaatcaactgttacatggaatgaaacttccagacaccgtacttta | |
| tgaatatttatgacgattccgaggcgcgcccggactacccgtatgatgttccggattatgccccgggcggatcca | |
| gtacctg-3′ | |

[0449] (digested with EcoRI and ALwNI)

| | |
|---|---|
| Stop2: | |
| 5′ -gccctacgggcctcgaggcacctggtgcggccgcatattaacgtagatttttcctcccaacgtcctgactg | (SEQ ID NO: 239) |
| gtataatgagccagttcttaaaatcgcataaccagtacatggtgattaaagttgaaattaaaccgtctcaagagc | |
| tttgttacgttgatttgggtaatgaagctt-3′ | |

(digested with BglI and HindIII)

[0451] The ligation mixture is digested with EcoRI and HindIII.

[0452] Multimers are separated on 1% agarose gel and DNA fragments corresponding to stop1-A-A-A-stop2 are purified from the gel. Stop1-A-A-A-stop2 fragments are subsequently PCR amplified using primers 5′-agcttcattacccaaatcaac-3′ and 5′ aattcaacgctactaccat-3′ and subsequently digested with XmaI and SfiI. Selected polynucleotides are then cloned into a phage expression system and tested for affinity for the target protein.

[0453] High affinity binders are subsequently isolated and sequenced. DNA encoding the high binders is cloned into expression vector and subsequently expressed in a suitable host. The expressed protein is then purified and characterized.

### Example 8

[0454] This example describes the development of CD20-specific LDL receptor-based A domains.

[0455] 10¹¹ phage displaying a library of 10⁹ A-domains were added to 10⁶ Raji or Daudi cells which had been pre-blocked with 5 mg/mL casein. The mixture was incubated at 4° C. for 2 hours to allow phage to bind. Cells were washed 5 times with 1 mg/mL casein in TBS. Cells were incubated with 1 mg/mL Rituxan in TBS at 4° C. for 2 hours to elute phage specific for CD20. Cells were spun down and the supernatant used to infect E. coli BluKan cells.

[0456] Phage were propagated for 2 days at 25° C. and purified by standard methods. Panning was repeated three times, alternating selection on either Raji or Daudi cells. Thirty-two clones were picked and incubated with Raji or Daudi cells in the presence or absence of 1 mg/mL Rituxan.

[0457] Clones which showed differential binding were sequenced (Table 1) and cloned into expression vectors with SKVILF peptides fused N- and C-terminally. Protein was produced and purified according to standard methods.

[0458] Raji or Daudi cells were incubated in fresh RPMI medium supplemented with 10% FBS in the presence or absence of purified monomers for 6 hours at 37° C. Dead cells were stained with trypan blue and counted visually using a hemocytometer (FIG. 16).

TABLE 1
CD20 binding sequences

| | |
|---|---|
| 2 | CLPDEFQCRSTGICIPLAWRCDGVNDCQDDSDETNCRATGRT |
| 3 | CLPGEFRCRGTSICIPPSWVCDGVDDCGDGSDEALEHCGDSHILPFS |
| | TPGPST |
| 4 | CQPNEFPCGSTGLCVPREWLCDGVDDCQDGSDEPDCGDSHILPFSTP |
| | GPST |
| 5 | CLPGEFRCRGTSICIPPSWVCDGVDDCGDGSDEALEHCGDSHILPFS |
| | TPGPST |
| 6 | CRSGEFKCHGTRPCVPQRWVCDGDDDCVDGSDEKSCETPARR |
| 7 | CRSSQFKCHNTRPCIPGRWVCDGVNDCLDGSDEANCRRAARR |
| 8 | CLPERFQCAVPGYCIPLPGVCDGVNDCQEDSDEPNCRAPGLR |
| 9 | CRRNEFRCKSGHCVPQPLVCDGVRDCEDNSDEPSCGRPGPGATSA |
| | PAA |
| 10 | CRAGEFPCKNGQCLPVTWLCDGVNDCLDGSDEKGCGRPGPGATSA |
| | PAA |
| 11 | CPSNEFTCKSGHCVPQPFVCDGVPDCEDNSDETSCGRPGPGATSA |
| | PAA |
| 14 | CRASEFPCRGTGTCIPRHWLCDGENDCADSSDEKDCGRPGPGATSA |
| | PAA |
| 15 | CPPDEFRCKSYKRCVPLAFVCDGVDDCEDGSDEEGCGRPGPGATSA |
| | PAA |
| 1 | CLPDEFQCRSTGICIPLAWRCDGVNDCQDDSDETNCRATGRT |
| 6 | CPAGEFQCGNGQCIPATWLCDGVNDCLDNSDETGCSQDPEFHKV |
| CC3 | CPASQFKCHNTRTCIPRRWVCDGVNDCLDGSDEANCRRAAPT |

### Example 9

[0459] This example describes the development of TPO-R-specific LDL receptor-based A domains.

[0460] 10¹¹ phage displaying a library of 10⁹ A-domains were added to recombinant TPO-R, which had been coated to Immunosorp plates (Nunc) and blocked with casein. Phage were incubated with the target for 3 hours at 4° C., washed 3 times with TBS buffer, and eluted with 100 mM Glycine pH 2.2. The eluate was neutralized by addition of 2M Na₂HPO₄ and used to infect E. coli BluKan cells.

[0461] Phage were propagated at 37° C. overnight, purified by standard methods, and the selection repeated one time. After the second round of selection on immobilized TPO-R, phage were added to a suspension of TF1 cells, which had been blocked previously with casein. Cells were incubated 2 hours at 4° C., then washed 5 times with TBS.

[0462] Phage were eluted by direct addition of E. coli to the cell suspension, followed by propagation of the phage at 23° C. for 2 days. The phage were purified by standard methods, and the selection on TF1 cells was repeated one time.

[0463] The phage resulting from the second round of selection on TF1 cells was used for one round of selection on immobilized recombinant TPO-R as described above, with the exception that phage were eluted using a solution of 50 mM EDTA and 20 mM DTT. Phage clones were picked and assayed for their ability to bind both recombinant TPO-R and TF1 cells (FIG. 17), and sequenced (Table 2).

[0464] Positive clones were genetically fused to create direct homodimers, with and without insertion of a 12 amino-acid repeated Gly-Gly-Ser linker between the domains, using standard molecular biology techniques, and were cloned into an expression vector. Protein was produced and purified using standard techniques. Protein was assayed for its ability to mimic natural TPO activity in a TF1 cell proliferation assay (FIG. 18).

TABLE 2
TPO-R Binding Sequences

| | |
|---|---|
| T4690 (TPO1) | CHSTGEFRCRSSGICVSPTWVCDGENDCLDGSDEASCTAAGPT |
| T5 (TPO2) | CPPSEFRCNSGQCIPREWRCDGDNDCADNSDEESCSAPASEPPGSLSLQ |
| T2 (TPO9) | CLPSEFRCSSGHCIPRRWRCDGEPDCQDGSDEANCGTSEHTSLQ |
| T1 (TPO10) | CQSNEFQCHNYNICLPRPWVCDGVNDCPDGSDEEGCSAPASEPPGSLSLQ |

### Example 10

[0465] This example describes the development of IgE-specific LDL receptor-based A domains and multimers.

[0466] 10¹¹ phage displaying a library of 10⁹ A-domains were added to human IgE, which had been immobilized on Immunosorp plates (Nunc) and blocked with casein. Soluble human IgG was added with the phage to a concentration of 5 mg/mL. Plates were incubated at 4° C. for 3 hours, then washed 3 times to remove unbound phage. Phage were eluted with a mixture of 50 mM EDTA, 20 mM DTT and used to infect E. coli. Phage were propagated at 25° C. for 2 days, and purified by standard methods.

[0467] Selection on immobilized IgE was repeated two times. Individual clones were sequenced and assayed for IgE binding affinity. A single clone, which was the major component of the selected library, was chosen for further study (Table 3).

[0468] The monomer binding epitope was mapped by measuring the number of phage bound to human IgE immobilized by one of several methods: 1) IgE directly coated to plastic, 2) IgE bound via an antibody that binds IgE at its CE2 domain, 3) IgE bound via an antibody that binds IgE at its CE3 domain, or 4) IgE bound via immobilized recombinant soluble IgE receptor. Differential frequencies of binding of the phage clones show the binding site on IgE that these phage clones recognize.

[0469] The data show that this monomer binds to CE3 and interferes with normal receptor binding (FIG. 19).

[0470] A new library was created by ligating a random domain to either the 5′ or 3′ end of the IgE binding sequence and ligating this construct into the fuse5 phage DNA. Phage were produced and purified by standard methods. Dimer phage were incubated with human IgE, which had been immobilized in 10-fold serial dilutions (from 1 μg to 10 ag per well) to an Immunosorp plate (Nunc) and blocked with casein. Soluble human IgG at 5 mg/mL was added with the phage. Wells were washed 10 times with 100 mM sodium acetate pH 5, and phage were eluted by direct addition of E. coli cells.

[0471] The phage titer eluted from each serial dilution was compared to the titer eluted from a blank well, and the lowest dilution which showed enrichment over the blank well was chosen for propagation (typically 1-10 pg per well). Phage were propagated at 25° C. for 2 days and purified by standard methods.

[0472] Phage were selected on serial dilutions 2 additional times. Individual clones were sequenced (Table 3).

TABLE 3
IgE-Binding Monomer Sequences

IGE-1
CPANEFQCRNSSTCIPRRWLCDGDDDCGDGSDETGCSAPASEPPGSLSLQ
Walked Dimers
1

[chemical structure]

CQPDQFRCSSGRCLSREWLCDGEDDCEDDSDETDCPTRTSLQ
2

[chemical structure]

CLPSQFPCDSGNCLPLTWLCDGVDDCGDNSDEEDCSAPASEPPGSLSLQ
3

[chemical structure]

CRANQFPCDNGNCLPQPWRCDGDNDCVDGSDETSCEAPAHTSLQ
4

[chemical structure]

CAPNEFQCRDNNTCLPEDWRCDGEDDCADNSDEANCTTPGPTSLQ
5

[chemical structure]

[chemical structure]

6
CGSGQFPCGSGHCVPLNWVCDGVDDCGDDSDETDCKAHT

[chemical structure]

7

[chemical structure]

CGADQFPCSSGHCIPLPWVCDGEDDCADGSDEADCRGTEPTSLQ
8

[chemical structure]

CAPSQFRCGNGRCIPRSWRCDGEDDCADDSDEENCSAPASEPPGSLSLQ
9
RVWRRLVGS
CRPNQFTCKSSETCIPAHWRCDGDDDCGDGSDEADCETRT

[chemical structure]

10

[chemical structure]

CQSSQFPCHDYEICLPATLLCDGVDDCLDGSDETNCAKPTSLQ
12

[chemical structure]

CPPGEFPCGNGRSVPLTWLCDGVDDCGDNSDETGCETTGRTSLQ
13 (27)
CGSNQFPCENGNCVPLGWGCDGVNDCQDNSDESLATCGRPGPGATSAPAA

[chemical structure]

14
CPSGQFPCDNGHCIPRRWLCDGEDDCPDGSDEAQVCQQRT

[chemical structure]

15

[chemical structure]

ALLCDGVDDCRDGSDESALCEEHT

[chemical structure]

16

[chemical structure]

CRRAEFTCRNGSCLPVPWLCDAENDCPDGSDEPDCGSPARRSLQ
19

[chemical structure]

CPPDQFRCKNGRCIPRHLVCDGDDDCGDDSDEAGCQTRTSLQ
21

[chemical structure]

CEPGQFQCNNNDTCVSPPWLCDADRDCGRSDERPPHCATPELTSLQ
23
CPAGQFRCENGRCLPPPWRCDGVNDCEDNSDEAGCGDSHILPFSTPGPST

[chemical structure]

25

[chemical structure]

CLSSQFRCENGQCIPLTWGCDGDDDCQDGSDETNCPTRTSLQ
26

[chemical structure]

[chemical structure]

27 (13)
CGSNQFPCENGNCVPLGWGCDGVNDCQDNSDESLATCGRPGPGATSAPAA

[chemical structure]

30

[chemical structure]

CAASQFRCNNNSRCLPPPLGCDGVDDCGDNSDEADCGRPGPGATSAPAASLQ
31

[chemical structure]

[chemical structure]

[0473] Furthermore, a naïve library (a combination of two libraries: A1 and A2) was panned on human IgE using standard methods for target immobilization, blocking, incubation with the library, repeated washing to remove the unbound and weakly bound phage, followed by elution of the bound phage, as described in the phage display manual (Phage Libraries: A Laboratory Manual (Barbas, ed., Academic Press, San Diego, Calif., 2001)). Human IgE was directly coated to a Maxysorp plate (Nunc) in the presence of excess soluble human IgG to remove non-specific binders. After 3 rounds, the phage pool was found to bind 10⁴ fold better to IgE than IgG. Sequencing revealed that the majority of the phage clones contained a single sequence (designated IgE-1) which bound to IgE with the highest affinity of all the sequences tested. By immobilizing IgE using an antibody directed against either the Cε2 or Cε3 region of IgE, it was shown that the IgE-1 monomer competed with the α-Cε3 antibody, but not the α-Cε2 antibody. Using an ELISA competition with recombinant human FcERI protein, it was shown that the monomer also competes for the natural receptor epitope, located in the Cε3 domain.

[0474] A new library of 5×10⁷ different multimers was created wherein a single random monomer domain (originating from either library A1 or A2) was fused either 5′ or 3′ to the IgE-1 sequence using BpmI and BsrDI restriction sites. The library was panned three rounds against a 10-fold serial dilution of immobilized human IgE from 10³-10⁻⁵ ng per well. Thirty-two clones were sequenced and ranked by ELISA binding. The highest affinity clone was found to be a homodimer of IgE-1, designated IgE1.5. Two other clones identified as high affinity were found to be heterodimers of IgE-1 and a novel domain: IgE-1.1 with a C-terminal domain, and IgE1.23 with an N-terminal domain.

[0475] The heterodimer clones were further dimerized in all possible combinations to generate a series of tetramers. The N- and C-terminal domain extensions were then combined in a single multimer, generating a trimer. All constructs were shown by. ELISA competition with recombinant FcERI to interfere with binding of the native human receptor. The constructs were also shown to not interfere with binding of Xolair (a commercial therapeutic anti-IgE antibody) to IgE, indicating that they bind to a distinct epitope. Affinities for each construct were determined by ELISA and Biacore and are reported below.

[0476] Sequences

Sequences

CPANEFQCRNSSTCIPRRWLCDGDDDCGDGSDETGCSAPASEPPGSL
IgE -2
CAASEFQCNSGNCVPGRWLCDGENDCEDSSDEAPALCTTSGPTSLQ
IgE-3
CQSNEFQCISGHCIPARWVCDGENDCGDGSDEAPDLCSAPASEPPGSLSLQ
Unselected dimers
IgE-1.6U

[chemical structure]

CQPGEFPCNSGQCLPLGWVCDGEDDCADGSDEKSCSQDPEFHKVSLQ
IgE-1.9U

[chemical structure]

CRASEFPCRDNSKCVPATWRCDGVDDCEDGSDETGCGRPGPGATSAPAASLQ
IgE-1.10U
CDPSAKFECSSGNCLSGPLRCDGVNDCGDSSDEPSALCSQDPEFHKV

[chemical structure]

IgE-1.4U
CPPNEFQCSNGHCLSQPWFCDGVNDCGDNSDEENCATHT

[chemical structure]

IgE-1.2U
CLADQFPCKSGKCTPLHWGCDGVNDCGDGSDESQLCGDSHILPFSTPGPST

[chemical structure]

Selected dimers
IgE-1.1

[chemical structure]

CQPDQFRCS SGRCLSREWLCDGEDDCEDDSDETDCPTRTSLQ
IgE-1.2

[chemical structure]

CLPSQFPCDSGNCLPLTWLCDGVDDCGDNSDEEDCSAPASEPPGSLSLQ
IgE-1.3

[chemical structure]

CRANQFPCDNGNCLPQPWRCDGDNDCVDGSDETS CEAPAHTSLQ
IgE-1.4

[chemical structure]

CAPNEFQCRDNNTCLPEDWRCDGEDDCADNSDEANCTTPGPTSLQ
IgE-1.5

[chemical structure]

[chemical structure]

IgE-1.6
CGSGQFPCGSGHCVPLNWVCDGVDDCGDDSDETDCKAHT

[chemical structure]

IgE-1.7

[chemical structure]

CGADQFPCSSGHCIPLPWVCDGEDDCADGSDEADCRGTEPTSLQ
IgE-1.8

[chemical structure]

CAPSQFRCGNGRCIPRSWRCDGEDDCADDSDEENCSAPASEPPGSLSLQ
IgE-1.9
RVWRRLVGS
CRPNQFTCKS SETCI PAHWRCDGDDDCGDGSDEADCETRT

[chemical structure]

IgE-1.10

[chemical structure]

CQSSQFPCHDYEICLPATLLCDGVDDCLDGSDETNCAKPTSLQ
IgE-1.12

[chemical structure]

CPPGEFPCGNGRSVPLTWLCDGVDDCGDNSDETGCETTGRTSIJQ
IgE-1.13 (27)
CGSNQFPCENGNCVPLGWGCDGVNDCQDNSDESLATCGRPGPGATSAPAA

[chemical structure]

IgE-1.14
CPSGQFPCDNGHCIPRRWLCDGEDDCPDGSDEAQVCQQRT

[chemical structure]

IgE-1.15

[chemical structure]

ALLCDGVDDCRDGSDESALCEEHT

[chemical structure]

IgE-1.16

[chemical structure]

CRRAEFTCRNGSCLPVPWLCDAENDCPDGSDEPDCGS PARRSLQ
IgE-1.17

[chemical structure]

IgE-1.19

[chemical structure]

CPPDQFRCKNGRCI PRHLVCDGDDDCGDDSDEAGCQTRTSLQ
IgE-1.21

[chemical structure]

CEPGQFQCNNNDTCVS PPWLCDADRDCGRSDERPPHCATPELTSLQ
IgE-1.23
CPAGQFRCENGRCLPPPWRCDGVNDCEDNSDEAGCGDSHILPFSTPGPST

[chemical structure]

IgE-1.25

[chemical structure]

CLSSQFRCENGQCIPLTWGCDGDDDCQDGSDETNCPTRTSLQ
IgE-1.26

[chemical structure]

[chemical structure]

IgE-1.27 (13)
CGSNQFPCENGNCVPLGWGCDGVNDCQDNSDESLATCGRPGPGATSAPAA

[chemical structure]

IgE-1.30

[chemical structure]

CAASQFRCNNNSRCLPPPLGCDGVDDCGDNSDEADCGRPGPGATSAPAASLQ
IgE-1.31

[chemical structure]

[chemical structure]

Multimers
IgE-1.23.23
CPAGQFRCENGRCLPPPWRCDGVNDCEDNSDEAGCGDSHILPFSTPGPST
CPANEFQCRNSSTCIPRRWLCDGDDDCGDGSDETGCSAPASEPPGSL
CPAGQFRCEMGRCLPPPWRCDGVNDCEDNSDEAGCGDSHILPFSTPGPST
CPANEFQCRNS STCIPRRWLCDGDDDCGDGSDETGCSAPASEPPGSL
IgE-1.23.1
CPAGQFRCENGRCLPPPWRCDGVNDCEDNSDEAGCGDSHILPFSTPGPST
CPANEFQCRNSSTCIPRRWLCDGDDDCGDGSDETGCSAPASEPPGSL
CPANEFQCRNSSTCIPRRWLCDGDDDCGDGSDETGCSAPASEPPGSL
CQPDQFRCSSGRCLSREWLCDGEDDCEDDSDETDCPTRT
IgE-1.1.23
CPANEFQCRNSSTCIPRRWLCDGDDDCGDGSDETGCSAPASEPPGSL
CQPDQFRCSSGRCLSREWLCDGEDDCEDDSDETDCPTRT
CPAGQFRCENGRCLPPPWRCDGVNDCEDNSDEAGCGDSHILPFSTPGPST
CPANEFQCRNSSTCIPRRWLCDGDDDCGDGSDETGCSAPASEPPGSL
IgE-1.1.1
CPANEFQCRNSSTCIPRRWLCDGDDDCGDGSDETGCSAPASEPPGSL
CQPDQFRCSSGRCLSREWLCDGEDDCEDDSDETDCPTRT
CPANEFQCRNSSTCIPRRWLCDGDDDCGDGSDETGCSAPASEPPGSL
CQPDQFRCSSGRCLSREWLCDGEDDCEDDSDETDCPTRT
IgE-1.23x1
CPAGQFRCENGRCLPPPWRCDGVNDCEDNSDEAGCGDSHILPFSTPGPST
CPANEFQCRNSSTCIPRRWLCDGDDDCGDGSDETGCSAPASEPPGSL
CQPDQFRCSSGRCLSREWLCDGEDDCEDDSDETDCPTRT

[0477] ELISA Rank of selected dimer clones

| | Avg. |
|---|---|
| Clone | Rank |
| 5 | 1 |
| 4 | 4 |
| 1 | 4 |
| 2 | 4 |
| 23 | 6 |
| 31 | 6 |
| 8 | 9 |
| 19 | 9 |
| 16 | 10 |
| 12 | 11 |
| 14 | 11 |
| 7 | 11 |
| 21 | 11 |
| 30 | 11 |
| 3 | 15 |
| 25 | 15 |
| 10 | 17 |
| 26 | 18 |
| 17 | 19 |
| 6 | 20 |
| 15 | 20 |
| 13 | 22 |
| Monomer | 22 |
| 9 | 24 |

[0478] Six serial dilutions of human IgE from 2.5 ng to 2.4 pg per well were immobilized in Nunc Maxisorp plates. Selected IgE dimers displayed on phage were incubated for 1 hour with the target, washed and detected using αM13-HRP. The ELISA signal at each target dilution was quantified and ranked with respect to all other dimer clones. The rank of each clone at each target dilution was then averaged over all target dilutions to obtain the relative affinities of each clone reported above.

[0479] Biacore Affinity Measurements of Selected Clones

| Clone | kₐ | k_{d} | K_{D} |
|---|---|---|---|
| IgE1 | 2.4 × 10⁴ | 2.7 × 10⁻² | 1.1 × 10⁻⁶ |
| IgE1.23 | 1.5 × 10⁴ | 4.9 × 10⁻³ | 3.2 × 10⁻⁷ |
| IgE1.5 | 1.8 × 10⁴ | 4.0 × 10⁻³ | 2.2 × 10⁻⁷ |
| IgE−1.23 × 1 | 5.2 × 10⁴ | 3.7 × 10⁻³ | 7.1 × 10⁻⁷ |
| IgE−1.23.23 | 1.7 × 10⁴ | 2.6 × 10⁻³ | 1.5 × 10⁻⁷ |
| Xolair | 4.8 × 10⁴ | 1.4 × 10⁻³ | 3.0 × 10⁻⁸ |
| FcERI | 8.4 × 10³ | 3.8 × 10⁻³ | 4.5 × 10⁻⁷ |

[0480] Human IgE was immobilized to a CM5 chip (BiaCore) using standard NHS/EDC methods. Sample proteins were dialyzed into HBS buffer overnight, and the dialysis buffer was used as a running buffer for the experiment. Sample proteins were run successively over IgE or ethanolamine coated flow cells, and the data analyzed using the BiaEvaluation software package.

### Example 11

[0481] This example describes the development of CD28-specific LDL receptor-based A domains and dimers by “walking.”

[0482] A library of DNA sequences encoding monomeric A domains was created by assembly PCR as described in Stemmer et al., Gene 164:49-53 (1995). The oligonucleotides used in this PCR reaction are:

5′-ATTCTCACTCGGCCGACGGTGCCTACCCGT-3′
5′-ACGGTGCCTACCCGTATGATGTTCCGGATTATGCCCCGGGTCTGGAGGCGTCTGGTGGTTCGTGT-3′
5′-CGCCGTCGCAAMSCMASBBCNSTGRAABGCATNTKYYGKWAYYSYKGCATYYAAATTBGBYGRDAGVKTBACACGAACC
ACCAGA-3′
5′-CGCCGTCGCAAMSCMASBBCNSTGRAABGCAKYKGCCGYTKYYGCATYYAAATTBGBYGRDAGVKTBACACGAACCACCAGA-3′
5′-CGCCGTCGCAAMSCMASBBCNSTGRAABGCATNTKYYGKWAYYSYKGCACBKGAACTSGYYCGVCNSACA
CGAACCACCAGA-3′
5′-CGCCGTCGCAAMCMASSSCNSTGRAABGCAKYKGCCGYTKYYGCACBKGAACTSGYYCGVCNSACACGAACCACCAGA-3′
5′-TTGCGACGGCGWWRATGATTGTSNGGACRRCTCGGATGAA-3′
5′-TTGCGACGGCGWWRATGATTGTSSGGACGGCTCGGATGAA-3′
5′-TTGCGACGGCGWWRATGATTGTSRGGACRRCTCGGATGAA-3′
5′-TTGCGACGGCGWWCCGCATTGTSNGGACRRCTCGGATGAA-3′
5′-TTGCGACGGCGWWCCGGATTGTSSGGACGGCTCGGATGAA-3′
5′-TTGCGACGGCGWWCCGGATTGTSRGGACRRCTCGGATGAA-3′
5′-AGGCCTGCAATGACGTABGCKBTKBACAGYYTKYTTCATCCGAGYYGTCC-3′
5′-AGGCCTGCAATGACGTABGTNCGGNSSYTBYACAGYYTKYTTCATCCGAGYYGTCC-3′
5′-AGGCCTGCAATGACACTTTGTGAAATTCCGGATCCTGGCTACAGYYTKYTTCATCCGAGYYGTCC-3′
5′-AGGCCTGCAATGACAGGGAACCCGGCGGTTCAGATGCTGGCGCGCTACAGYYTKYTTCATCCGAGYYGTCC-3′
5′-AGGCCTGCAATGACGCTGCCGGTGCAGAAGTCGCACCTGGGCCCGGACGACCACAGYYTKYTTCATCCGAGYYGTCC-3′
5′-AGGCCTGCAATGACGTGCTCGGACCTGGGGTGCTAAACGGCAGAATATGAGAATCACCACAGYYTKYTTCATCCGAGYYGTCC-3′
5′-AGGCCTGCAATGACGTABGCKBTKBACAMWSCKSCGVTTCATCCGAGCCGTCC-3′
5′-AGGCCTGCAATGACGTABGTNCGGNSSYTBYACAMWSCKSCGVTTCATCCGAGCCGTCC-3′
5′-AGGCCTGCAATGACACTTTGTGAAATTCCGGATCCTGGCTACAMWSCKSCGVTTCATCCGAGCCGTCC-3′
5′-AGGCCTGCAATGACAGGGAACCCGGCGGTTCAGATGCTGGCGCGCTACAMWSCKSCGVTTCATCCGAGCCGTCC-3′
5′-AGGCCTGCAATGACGCTGCCGGTGCAGAAGTCGCACCTGGGCCCGGACGACCACAMWSCKSCGVTTCATCCGAGCCGTCC-3′
5′-AGGCCTGCAATGACGTGCTCGGACCTGGGGTGCTAAACGGCAGAATATGAGAATCACCACAMWSCKSCGVTTCATCCGAGC
CGTCC-3′
5′-AGGCCTGCAATGACGTABGCKBTKBACAGDKWKCCRRCGVTTCATCCGAGYYGTCC-3′
5′-AGGCCTGCAATGACGTABGTNCGGNSSYTBYACAGDKWKCCRRCGVTTCATCCGAGYYGTCC-3′
5′-AGGCCTGCAATGACACTTTGTGAAATTCCGGATCCTGGCTACAGDKWKCCRRCGVTTCATCCGAGYYGTCC-3′
5′-AGGCCTGCAATGACAGGCAACCCGGCGGTTCAGATGCTGGCGCGCTACAGDKWKCCRRCGVTTCATCCGAGYYGTCC-3′
5′-AGGCCTGCAATGACGCTGCCGGTGCAGAAGTCGCACCTGGGCCCGGACCACCACAGDKWKCCRRCGVTTCATCCGAGYYGTCC-3′
5′-AGGCCTGCAATGACGTGCTCCGACCTGGGGTGCTAAACGGCAGAATATGAGAATCACCACAGDKWKCCRRCGVTTCATCCGAGYYG
TCC-3′
5′-TGAATTTTCTGTATGAGGTTTTGCTAAACAACTTTCAACAGTTTCGGCCCCAGAGGCCTGCAATGAC-3′

(R = A/G, Y = C/T, M = A/C, K = G/T, S = C/G, W = A/T, B = C/G/T, D = A/G/T, H = A/C/T, V = A/C/G, and N = A/C/G/T)

[0483] PCR fragments were digested with XmaI and SfiI. Digestion products were separated on 3% agarose gel and A domain fragments are purified from the gel. The DNA fragments were ligated into the corresponding restriction sites of phage display vector fuse5-HA, a derivative of fuse5 carrying an in-frame HA-epitope. The ligation mixture was electroporated into TransforMax™ EC100™ electrocompetent E. coli cells. Transformed E. coli cells were grown overnight at 37° C. in 2×YT medium containing 20 μg/ml tetracycline and 2 mM CaCl₂.

[0484] Phage particles were purified from the culture medium by PEG-precipitation. Individual wells of a 96-well microtiter plate (Maxisorp) were coated with target protein (IL-6 or CD28, 1 μg/well) in 0.1 M NaHCO₃. After blocking the wells with TBS buffer containing 10 mg/ml casein, purified phage was added at a typical number of ˜1−3×10¹¹. The microtiter plate was incubated at 4° C. for 4 hours, washed 5 times with washing buffer (TBS/Tween) and bound phages were eluted by adding glycine-HCl buffer pH 2.2. The eluate was neutralized by adding 1 M Tris-HCl (pH 9.1). The phage eluate was amplified using E. coli K91BlueKan cells and after purification used as input to a second and a third round of affinity selection (repeating the steps above).

[0485] Phage from the final eluate was used directly, without purification, as a template to PCR amplify A domain encoding DNA sequences. The oligonucleotides used in this PCR reaction are:

5′-aagcctcagcgaccgaa
5′-agcccaataggaacccat

[0486] The PCR products were purified and subsequently 50% was digested with BpmI and the other 50% with BsrDI.

[0487] The digested monomer fragments were ‘walked’ to dimers by attaching a library of naive A domain fragments using DNA ligation. Naive A domain sequences were obtained by PCR amplification of the initial A domain library (resulting from the PEG purification described above) using the A domain primers described above. The PCR fragments were purified, split into 2 equal amounts and then digested with either BpmI or BsrDl.

[0488] Digestion products were separated on a 2% agarose gel and A domain fragments were purified from the gel. The purified fragments were combined into 2 separate pools (naïve/BpmI+selected/BsrDl & naïve/BsrDI+selected/BpmI) and then ligated overnight at 16° C.

[0489] The dimeric A domain fragments were PCR amplified (5 cycles), digested with XmaI and SfiI and purified from a 2% agarose gel. Screening steps were repeated as described above except for the washing, which was done more stringently to obtain high-affinity binders. After infection, the K91BlueKan cells were plated on 2×YT agar plates containing 40 μg/ml tetracycline and grown overnight. Single colonies were picked and grown overnight in 2×YT medium containing 20 μg/ml tetracycline and 2 mM CaCl₂. Phage particles were purified from these cultures.

[0490] Binding of the individual phage clones to their target proteins was analyzed by ELISA. Clones yielding the highest ELISA signals were sequenced and subsequently recloned into a protein expression vector. Exemplary sequences are provided below:

>CD28-A1
CGPGRFQCESGQCIPATWVCDGENDCVDDSDEKSCATTAPTCLPDQFQCHDYRRCIPLGWVCDGVPDCVDNSDEA
NCEPPT
>CD28-A2
CGPGRFQCESGQCIPATWVCDGENDCVDDSDEKSCATTAPTCPPDQFTCNSGRCVPLNWLCDGVNDCADSSDEPP
ECQPRT
>CD28-A10
CGPGRFQCESGQCVPATWVCDGDDDCADGSDEKSCATTAPTCESNQFQCGSGQCLPGTWRCDGVNDCADSSDETG
CGRPGPGATSAPAACGPGRFQCNNGNCVPQTLGCDGDNDCGDSSDEANCSAPASEPPGSL
>CD28-A4
CGPGRFQCESGQCIPATWVCDGENDCVDDSDEKSCATTAPTCPANQFQCGNGRCIPPAWLCDGVNDCGDGSDESQ
LCAATGPT
>CD28-A5
CGPGRFQCESGQCIPATWVCDGENDCVDDSDEKSCATTAPTCLPNEFRCSNGQCIPPNWRCDGVDDCRDGSDEAG
CSQDPEFHKV
>CD28-A7
CGPGRFQCESGQCIPATWVCDGENDCVDDSDEKSCATTAPTCGSGQFRCSNGNCLPLRLGCDGVDDCGDSSDEPL
DPCAATVRT
>CD28-A17
CGPGRFQCESGQCIPATWVCDGENDCVDDSDEKSCATTAPTCPSGQFKCNSGRCVPPNWLCDGVNDCPDNSDEAN
CPPRT
>CD28-A19
CGPGRFQCESGQCIPATWVCDGENDCVDDSDEKSCATTAPTCQADEFQCQSSGKCLPVNWVCDGDNDCGDDSDET
NCATTGRT

[0491] Protein production was induced in the expression vectors with IPTG and purified by metal chelate affinity chromatography. CD28-specific monomers were characterized as follows.

[0492] Biacore

[0493] Two hundred fifty RU CD28 were immobilized by NHS/EDC coupling to a CM5 chip (Biacore). 0.5 and 5 μM solutions of monomer protein were flowed over the derivatized chip, and the data were analyzed using the standard Biacore software package. See, Table 4.

TABLE 4

| CD28 | ka | kd | KD |
|---|---|---|---|
| 4 | 5.3E+03 | 3.9E−03 | 7.4E−07 |
| 5 | 1.7E+04 | 8.3E−04 | 4.8E−08 |
| 7 | 3.0E+04 | 3.2E−03 | 1.1E−07 |
| 17 | 1.4E+04 | 2.6E−03 | 1.9E−07 |
| 18 | 5.1E+02 | 2.1E−03 | 4.1E−06 |
| 19 | 1.8E+04 | 2.4E−03 | 1.3E−07 |
| 1 | 2.9E+03 | 3.9E−03 | 1.3E−06 |
| 2 | 7.4E+04 | 2.2E−03 | 3.0E−08 |
| 10 | 5.8E+04 | 1.7E−03 | 2.9E−08 |

[0494] ELISA

[0495] Ten nanograms of CD28 per well was immobilized by hydrophobic interaction to 96-well plates (Nunc). Plates were blocked with 5 mg/mL casein. Serial dilutions of monomer protein were added to each well and incubated for 3 hours. Plates were washed to remove unbound protein and probed with α-HA-HRP to detect monomers. See, FIG. 20 and Table 5.

TABLE 5

| | Biacore | ELISA |
|---|---|---|
| 4 | 7.4E−07 | 1.4E−07 |
| 5 | 4.8E−08 | 1.0E−06 |
| 7 | 1.1E−07 | 1.2E−06 |
| 17 | 1.9E−07 | 5.4E−09 |
| 18 | 4.1E−06 | 1.0E−05 |
| 19 | 1.3E−07 | 6.3E−07 |
| 1 | 1.3E−06 | 7.8E−07 |
| 2 | 3.0E−08 | 1.6E−08 |
| 10 | 2.9E−08 | 1.7E−10 |

PBMC Assays

[0497] Efficacy assays were performed using human and monkey PBMC as described above. CD28 results in PBMC assays:

[0498] On human cells:

| | | | |
|---|---|---|---|
| CD28 | clone 18 | IC50 = >1,000 nM | |
| monomer | | (low activity) | |
| CD28 dimer | clone 7 | IC50 = 2 nM = 14 ng/ml | inhibition = 82% |
| CD28 trimer | clone 10 | IC50 = 3 nM = 40 ng/ml | inhibition = 81% |
| On monkey | | | |
| cells: | | | |
| CD28 dimer | clone 7 | IC50 = 2 nM | inhibition = 54% |
| CD28 trimer | clone 10 | IC50 = 7 nM | inhibition = 81% |

### Example 12

[0499] This example describes the development of IL6-specific LDL receptor-based A domains and dimers.

[0500] A library of DNA sequences encoding monomeric A domains was created by assembly PCR as described in Stemmer et al., Gene 164:49-53 (1995). The oligonucleotides used in this PCR reaction are:

5′-ATTCTCACTCGGCCGACGGTGCCTACCCCT-3′
5′-ACGGTGCCTACCCGTATGATGTTCCGGATTATGCCCCGGCTCTGGAGGCGTCTGGTGGTTCGTGT-3′
5′-CGCCGTCGCAANSCMASBBCNSTGRAABGCATNTKYYGKWAYYSYKGCATYYAAATTBGBYGRDAGVKTBACACGAACC
ACCAGA-3′
5′-CGCCGTCGCAAMSCMASBBCNSTGRAABGCAKYKGCCGYTKYYGCATYYAAATTBGBYGRDAGVKTBACACGAACCACCAGA-3′
5′-CGCCGTCGCAAMSCMASBBCNSTGRAABGCATNTKYYGKWAYYSYKGCACBKGAACTSGYYCGVCNSACA
CGAACCACCAGA-3′
5′-CGCCGTCGCAAMSCMASBBCNSTGRAABGCAKYKGCCGYTKYYGCACBKGAACTSGYYCGVCNSACACGAACCACCAGA-3′
5′-TTGCGACGGCGWWRATGATTGTSNGGACRRCTCGGATGAA-3′
5′-TTGCGACGGCGWWRATGATTGTSSGGACGGCTCGGATGAA-3′
5′-TTGCGACGGCGWWRATGATTGTSRGGACRRCTCGGATGAA-3′
5′-TTGCGACGGCGWWCCGGATTGTSNGGACRRCTCGGATGAA-3′
5′-TTGCGACGGCGWWCCGGATTGTSSGGACGGCTCGGATGAA-3′
5′-TTGCGACGGCGWWCCGGATTGTSRGGACRRCTCGGATGAA-3′
5′-AGGCCTGCAATGACGTABGCKBTKBACAGYYTKYTTCATCCGAGYYGTCC-3′
5′-AGGCCTGCAATGACGTABGTNCGGNSSYTBYACAGYYTKYTTCATCCGAGYYGTCC-3′
5′-AGGCCTGCAATGACACTTTGTCAAATTCCGGATCCTGGCTACAGYYTKYTTCATCCGAGYYGTCC-3′
5′-AGGCCTGCAATGACAGGGAACCCGGCGGTTCAGATGCTGGCGCGCTACAGYYTKYTTCATCCGAGYYGTCC-3′
5′-AGGCCTGCAATGACGCTGCCGGTGCAGAAGTCGCACCTGGGCCCGGACGACCACAGYYTKYTTCATCCGAGYYGTCC-3′
5′-AGGCCTGCAATGACGTGCTCGGACCTGGGGTGCTAAACGGCAGAATATGAGAATCACCACAGYYTKYTTCATCCGAGYYGTCC-3′
5′-AGGCCTGCAATGACGTABGCKBTKBACAMWSCKSCGVTTCATCCCAGCCGTCC-3′
5′-AGGCCTGCAATGACGTABGTNCGGNSSYTBYACAMWSCKSCGVTTCATCCGAGCCGTCC-3′
5′-AGGCCTGCAATGACACTTTGTGAAATTCCGGATCCTGGCTACAMWSCKSCGVTTCATCCGAGCCGTCC-3′
5′-AGGCCTGCAATGACAGGGAACCCGGCGGTTCAGATGCTGGCGCGCTACAMWSCKSCGVTTCATCCGAGCCGTCC-3′
5′-AGGCCTGCAATGACGCTGCCGGTGCAGAAGTCGCACCTGGGCCCGGACGACCACAMWSCKSCGVTTCATCCGAGCCGTCC-3′
5′-AGGCCTGCAATGACGTGCTCGGACCTGGGGTGCTAAACGGCAGAATATGAGAATCACCACAMWSCKSCGVTTCATCCGAGC
CGTCC-3′
5′-AGGCCTGCAATGACGTABGCKBTKBACAGDKWKCCRRCGVTTCATCCGAGYYGTCC-3′
5′-AGGCCTGCAATGACGTABGTNCGGNSSYTBYACAGDKWKCCRRCGVTTCATCCGAGYYGTCC-3′
5′-AGGCCTGCAATGACACTTTGTGAAATTCCCGATCCTGGCTACAGDKWKCCRRCGVTTCATCCGAGYYGTCC-3′
5′-AGGCCTGCAATGACAGGGAACCCGGCGGTTCAGATGCTGGCGCGCTACAGDKWKCCRRCGVTTCATCCGAGYYGTCC-3′
5′-AGGCCTGCAATGACGCTGCCGGTGCAGAAGTCGCACCTGGGCCCGGACGACCACAGDKWKCCRRCGVTTCATCCGAGYYGTCC-3′
5′-AGGCCTGCAATGACGTGCTCGGACCTGGGGTGCTAAACGGCAGAATATGAGAATCACCACAGDKWKCCRRCGVTTCATCCGAGYYG
TCC-3′
5′-TGAATTTTCTGTATGAGGTTTTGCTAAACAACTTTCAACAGTTTCGGCCCCAGAGGCCTGCAATGAC-3′

(R = A/G, Y = C/T, M = A/C, K = G/T, S = C/G, W = A/T, B = C/G/T, D = A/G/T, H = A/C/T, V = A/C/G, and N = A/C/G/T)

[0501] PCR fragments were digested with XmaI and SfiI. Digestion products were separated on 3% agarose gel and A domain fragments are purified from the gel. The DNA fragments were ligated into the corresponding restriction sites of phage display vector fuse5-HA, a derivative of fuse5 carrying an in-frame HA-epitope. The ligation mixture was electroporated into TransforMax™ EC100™ electrocompetent E. coli cells. Transformed E. coli cells were grown overnight at 37° C. in 2×YT medium containing 20 μg/ml tetracycline and 2 mM CaCl₂.

[0502] Phage particles were purified from the culture medium by PEG-precipitation. Individual wells of a 96-well microtiter plate (Maxisorp) were coated with target protein (IL-6 or CD28, 1 μg/well) in 0.1 M NaHCO₃. After blocking the wells with TBS buffer containing 10 mg/ml casein purified phage was added at a typical number of ˜1−3×10¹¹. The microtiter plate was incubated at 4° C. for 4 hours, washed 5 times with washing buffer (TBS/Tween) and bound phages were eluted by adding glycine-HCl buffer pH 2.2. The eluate was neutralized by adding 1 M Tris-HCl (pH 9.1). The phage eluate was amplified using E. coli K91BlueKan cells and after purification used as input to a second and a third round of affinity selection (repeating the steps above).

[0503] Phage from the final eluate was used directly, without purification, as a template to PCR amplify A domain encoding DNA sequences. The oligonucleotides used in this PCR reaction are:

5′-aagcctcagcgaccgaa
5′-agcccaataggaacccat

[0504] The PCR products were purified and subsequently 50% was digested with BpmI and the other 50% with BsrDI.

[0505] Digestion products were separated on a 2% agarose gel and A domain monomer fragments were purified from the gel. The purified fragments were pooled and subsequently dimerized by overnight ligation at 16° C.

[0506] Clones were identified by the same methods as those described above for CD28. Identified clones included the following:

>I16#4
CLSSQFQCKNGQCIPQTWVCDGDNDCEDDSDETGCGDSHILPFSTPGPSTCPPSQFTCRSTNTCIPAPWRCDGD
DDCEDDSDEEGCSAPASEPPGSL
>IL6#7
CLSSQFQCKNGQCIPQTWVCDGDNDCEDDSDETGCGDSHILPFSTPGPSTCRSNEFQCRSSGICIPRTWVCDGD
DDCLDNSDEKDCAART
>IL6#9
CRSDQFQCGSGHCIPQDWVCDGENDCEDGSDETDCSAPASEPPGSLCLSSQFQCKNGQCIPQTWVCDGDNDCED
DSDETGCGDSHILPFSTPGPST
>IL6#P8
CRSDQFQCGSGHCIPQDWVCDGENDCEDGSDETDCSAPASEPPGSLCRSNEFQCRSSGICIPRTWVCDGDDDCL
DNSDEKDCAART
>IL6#N7
CPPSQFTCRSTNTCIPAPWRCDGDDDCEDDSDEADCGDSHILPFSTPGPSTCLSSQFQCKNGQCIPQTWVCDGD
NDCEDDSDETGCGDSHILPFSTPGPST

[0507] Biacore

[0508] One hundred eighty RU IL6 were immobilized by NHS/EDC coupling to a CM5 chip (Biacore). 0.1, 0.5, 1, and 5 μM solutions of monomer protein were flowed over the derivatized chip, and the data were analyzed using the standard Biacore software package. See, Table 6.

TABLE 6

| | kon (M − 1s − 1) | koff(s − 1) | Kd |
|---|---|---|---|
| IL-6 clone 9 | 3.0 × 10e4 | 7.3 × 10e−4 | 26 nM |
| IL-6 clone 4 | 4.0 × 10e3 | 2.6 × 10e−4 | 65 nM |

[0509] Competition ELISA

[0510] IL6 receptor was biotinylated with biotin-S-S-NHS (Pierce). 2×10⁻¹⁵ mol of IL6 were immobilized by hydrophobic interaction to 96-well plates (Nunc). Plates were blocked with 5 mg/mL casein. 8×10⁻¹⁵ mol of biotinylated IL6 receptor was added to each well. Serial dilutions of monomer protein were added to each well in duplicate and incubated for 3 hours. Plates were washed to remove unbound protein and probed with either α-HA-HRP (to detect monomers) or streptavidin-HRP (to detect IL6 receptor). See, FIG. 21.

[0511] Cell Proliferation Inhibition

[0512] TF1 cells were incubated for three days with 5 ng/mL IL6 and serial dilutions of monomer protein. Proliferation was measured by tritiated thymidine incorporation. See, FIG. 22.

[0513] PBMC Assays

[0514] In order to assay the ex-vivo efficacy of monomers, they were tested on isolated peripheral blood lymphocytes (PBMC). These were obtained from freshly drawn, sodium-heparinized blood of healthy volunteers or cynomolgus monkeys by centrifugation on Ficoll-Hypaque (Sigma, St. Louis, Mo.) according to standard procedures. 1×10⁵ PBMC per well were stimulated either with 0.2 ug/ml of a monoclonal antibody against human CD3 (Pharmingen, San Diego, Calif.) (when using human cells) or 1 ng/ml Staphylococcus enterotoxin B (Toxin Technology, Sarasota, Fla.) (human or monkey cells) in a 96-plate in Dulbecco's Modified Eagle medium (Invitrogen) containing 10% fetal calf serum and 100 units of each penicillin and streptomycin. Monomer protein was added in varying concentrations to each culture and incubation occurred for 3 days at 37° C. in a CO₂ containing atmosphere. During the last 9 hours, cultures were pulsed with 1 uCi per well of ³H thymidine (ICN, Costa Mesa, Calif.) and the incorporation of radioactivity was measured on a Wallac Trilux Microbeta scintillation counter (Perkin Elmer, Boston, Mass.). See, FIG. 23.

### Example 13

[0515] This example describes construction of monomer or multimer-Fc fusions and their expression in mammalian cells.

[0516] A number of different monomer and multimer/antibody fusions can be designed. Exemplary possibilities include those depicted in FIG. 29, in which circles represent monomers and/or multimers.

[0517] To demonstrate that monomers or multimers of the invention could be expressed in a mammalian system, multimer construct anti-BAFF-A3 (a homotrimer of three copies of the A clone, which is an anti-BAFF domain) was transferred to a mammalian expression vector in two formats. In one format, the anti-BAFF-A3 trimer was genetically fused to a human Fc sequence included in the expression vector (see the conformation labeled “monomer or multimer-Fc fusion” in FIG. 29). In the second format, the anti-BAFF-A3 trimer was genetically fused C-terminal to the anti-IgG156 (anti-hIgG, clone 156) monomer domain.

[0518] Stable transfectants of CHO cells were isolated and screened for clones expressing protein by standard methods. Briefly, supernatant from cell cultures was analyzed by SDS-PAGE and western analysis to identify high expressing clones. The multimer-Fc fusion was purified from the supernatant using protein A agarose beads and analyzed by SDS-PAGE. A single band of molecular weight ˜110 kD was observed, and, upon treatment with dithiothreitol, the band shifted to a single species of ˜55 kD, indicating that the correct protein product was being produced and that the native disulfides were completely formed. Quantitation of the purified protein indicated a yield of >1.2 mg/L. It was demonstrated that the mammalian-expressed proteins were glycosylated, most likely at a consensus N-linked glycosylation site (N×S) present in the anti-BAFF-A domain.

| Construct 1: anti-BAFF-A3-Fc fusion | |
|---|---|
| Oligos | |
| BA-FC-F8 | GATGAAAAAAGCTGTAAACCGGAATTCTGTCTGTC |
| BA-FC-R8 | CGGACGGGCCAGTTTGGCCTACGCGGCCGCCGTAGGCT |
| Final Sequence | |
| GAATTCTGTCTGTCGGGCCAGTTCCAGTGCAACGATTCCGGCATATGCATTCCAC | |
| GGCACTGGGTTTGCGACGGCGTTAATGATTGTGAGGACGACTCGGATGAAGCAG | |
| GCTGTACACAGCCTACGTGTCTGTCGGGCCAGTTCCAGTGCAACGATTCCGGCAT | |
| ATGCATTCCACGGCACTGGGTTTGCGACGGCGTTAATGATTGTGAGGACGACTCG | |
| GATGAAGCAGGCTGTACACAGCCTACGTGTCTGTCGGGCCAGTTCCAGTGCAAC | |
| GATTCCGGCATATGCATTCCACGGCACTGGGTTTGCGACGGCGTTAATGATTGTG | |
| AGGACGACTCGGATGAAGCAGGCTGTACACAGCCTACGGCGGCCGCA | |
| Construct 2: anti-IgG156-BAFF-A3 | |
| Oligos | |
| BA-NT-F | GGTCTGGAGGCGTCTGGTGAATTCTGTCTGTCGAGCG |
| BA-NT-R8 | CGGACGGGCCAGTTTGGCCTACGCGGCCGCCTACGTAGGCT |

Final Sequence
GAATTCTGTCTGTCGAGCGAGTTCCAGTGCCAGAGTTCCGGCAGATGCATTCCAC
TGGCCTGGGTTTGCGACGGCGATAATGATTGTCGGGACGACTCGGATGAAAAAA
GCTGTAAACCGCGTACGTGTCTGTCGGGCCAGTTCCAGTGCAACGATTCCGGCAT
ATGCATTCCACGGCACTGGGTTTGCGACGGCGTTAATGATTGTGAGGACGACTCG
GATGAAGCAGGCTGTACACAGCCTACGTGTCTGTCGGGCCAGTTCCAGTGCAAC
GATTCCGGCATATGCATTCCACGGCACTGGGTTTGCGACGGCGTTAATGATTGTG
AGGACGACTCGGATGAAGCAGGCTGTACACAGCCTACGTGTCTGTCGGGCCAGT
TCCAGTGCAACGATTCCGGCATATGCATTCCACGGCACTGGGTTTGCGACGGCGT
TAATGATTGTGAGGACGACTCGGATGAAGCAGGCTGTACACAGCCTACGTAGGC
GGCCGCA

### Example 14

[0519] This example describes in vivo intra-protein recombination to generate libraries of greater diversity.

[0520] A monomer-encoding plasmid vector (pCK-derived vector; see below), flanked by orthologous loxP sites, was recombined in a Cre-dependent manner with a phage vector via its compatible loxP sites. The recombinant phage vectors were detected by PCR using primers specific for the recombinant construct. DNA sequencing indicated that the correct recombinant product was generated.

[0521] Reagents and Experimental Procedures

[0522] pCK-cre-lox-Mb-loxP. This vector has two particularly relevant features. First, it carries the cre gene, encoding the site-specific DNA recombinase Cre, under the control of P_{lac}. Cre was PCR-amplified from p705-cre (from GeneBridges) with cre-specific primers that incorporated XbaI (5′) and SfiI (3′) at the ends of the PCR product. This product was digested with XbaI and SfiI and cloned into the identical sites of pCK, a bla⁻,Cm^{R} derivative of pCK110919-HC-Bla (PACYC ori), yielding pCK-cre.

[0523] The second feature is the naïve A domain library flanked by two orthologous loxP sites, loxP(wild-type) and loxP(FAS), which are required for the site-specific DNA recombination catalyzed by Cre. See, e.g., Siegel, R. W., et al. FEBS Letters 505:467-473 (2001). These sites rarely recombine with another. loxP sites were built into pCK-cre sequentially. 5′-phosphorylated oligonucleotides loxP(K) and loxP(K_rc), carrying loxP(WT) and EcoRI and HinDIII-compatible overhangs to allow ligation to digested EcoRI and HinDIII-digested pCK, were hybridized together and ligated to pCK-cre in a standard ligation reaction (T4 ligase; overnight at 16 C).

[0524] The resulting plasmid was digested with EcoRI and SphI and ligated to the hybridized, 5′-phosphorylated oligos loxP(L) and loxP (L_rc), which carry loxP(FAS) and EcoRI and SphI-compatible overhangs. To prepare for library construction, a large-scale purification (Qiagen MAXI prep) of pCK-cre-lox-P(wt)-loxP(FAS) was performed according to Qiagen's protocol. The Qiagen-purified plasmid was subjected to CsCl gradient centrifugation for further purification. This construct was then digested with SphI and BglII and ligated to digested naïve A domain library insert, which was obtained via a PCR-amplification of a preexisting A domain library pool. By design, the loxP sites and Mb are in-frame, which generates Mbs with loxP-encoded linkers. This library was utilized in the in vivo recombination procedure as detailed below.

[0525] fUSE5HA-Mb-lox-lox vector. The vector is a derivative of fUSE5 from George Smith's laboratory (University of Missouri). It was subsequently modified to carry an HA tag for immunodetection assays. loxP sites were built into fUSE5HA sequentially. 5′phosphorylated oligonucleotides loxP(I) and loxP(I)_rc, carrying loxP(WT), a string of stop codons and XmaI and SfiI-compatible overhangs, were hybridized together and ligated to XmaI- and SfiI-digested fUSE5HA in a standard ligation reaction (New England Biolabs T4 ligase; overnight at 16 C).

[0526] The resulting phage vector was next digested with XmaI and SphI and ligated to the hybridized oligos loxP(J) and loxP(J)_rc, which carry loxP(FAS) and overhangs compatible with XmaI and SphI. This construct was digested with XmaI/SfiI and then ligated to pre-cut (XmaI/SfiI) naïve A domain library insert (PCR product). The stop codons are located between the loxP sites, preventing expression of gIII and consequently, the production of infectious phage.

[0527] The ligated vector/library was subsequently transformed into an E. coli host bearing a gIII-expressing plasmid that allows the rescue of the fUSE5HA-Mb-lox-lox phage, as detailed below.

[0528] pCK-gIII. This plasmid carries gIII under the control of its native promoter. It was constructed by PCR-amplifying gIII and its promoter from VCSM13 helper phage (Stratagene) with primers gIIIPromoter_EcoRI and gIIIPromoter_HinDIII. This product was digested with EcoRI and HinDIII and cloned into the same sites of pCK110919-HC-Bla. As gIII is under the control of its own promoter, gIII expression is presumably constitutive. pCK-gIII was transformed into E. coli EC100 (Epicentre).

[0529] In vivo recombination procedure. In summary, the procedure involves the following key steps: a) Production of infective (i.e. rescue) of fUSE5HA-Mb-lox-lox library with an E. coli host expressing gIII from a plasmid; b) Cloning of 2^{nd} library (pCK) and transformation into F⁺TGI E. coli; c) Infection of the culture carrying the 2^{nd} library with the rescued fUSE5HA-Mb-lox-lox phage library.

[0530] a. Rescue of phage vector. Electrocompetent cells carrying pCK-gIII were prepared by a standard protocol. These cells had a transformation frequency of 4×10⁸/μg DNA and were electroporated with large-scale ligations (˜5 μg vector DNA) of fUSE5HA-lox-lox vector and the naïve A domain library insert. After individual electroporations (100 ng DNA/electroporation) with ˜70 μL cells/cuvette, 930 μL warm SOC media were added, and the cells were allowed to recover with shaking at 37 C for 1 hour. Next, tetracycline was added to a final concentration of 0.2 μg/mL, and the cells were shaken for ˜45 minutes at 37 C. An aliquot of this culture was removed, 10-fold serially diluted and plated to determine the resulting library size (1.8×10⁷). The remaining culture was diluted into 2×500 mL 2×YT (with 20 μg/mL chloramphenicol and 20 μg/mL tetracycline to select for pCK-gIII and the fUSE5HA-based vector, respectively) and grown overnight at 30 C.

[0531] Rescued phage were harvested using a standard PEG/NaCl precipitation protocol. The titer was approximately 1×10¹² transducing units/mL.

[0532] b. Cloning of the 2^{nd} library and transformation into an E. coli host. The ligated pCK/naïve A domain library is electroporated into a bacterial F⁺host, with an expected library size of approximately 10⁸. After an hour-long recovery period at 37 C with shaking, the electroporated cells are diluted to OD₆₀₀˜0.05 in 2×YT (plus 20 μg/mL chloramphenicol) and grown to mid-log phase at 37 C before infection by fUSEHA-Mb-lox-lox.

[0533] c. Infection of the culture carrying the 2^{nd} library with the rescued fUSE5HA-Mb-lox-lox phage library. To maximize the generation of recombinants, a high infection rate (>50%) of E.coli within a culture is desirable. The infectivity of E. coli depends on a number of factors, including the expression of the F pilus and growth conditions. E. coli backgrounds TG1 (carrying an F′) and K91 (an Hfr strain) were hosts for the recombination system.

[0534] Oligonucleotides

loxP(K)
[P-5′ agcttataacttcgtatagaaaggtatatacgaagttatagatctcgtgctgcatgcggtgcg]
loxP(K_rc)
[P-5′ aattcgcaccgcatgcagcacgagatctataacttcgtatatacctttctatacgaagttataagct]
loxP(L)
[P-5′ ataacttcgtatagcatacattatacgaagttatcgag]
loxP (L_rc)
[P-5′ ctcgataacttcgtataatgtatgctatacgaagttatg]
loxP(I)
[P5′ccgggagcagggcatgctaagtgagtaataagtgagtaaataacttcgtatatacctttctatacgaagttatcgtctg]
loxP(I)_rc
[P-5′ acgataacttcgtatagaaaggtatatacgaagttatttactcacttattactcacttagcatgccctgctc]
loxP(J)
[5′ ccgggaccagtggcctctggggccataacttcgtatagcatacattatacgaagttatg]
loxP(J)_rc
[5′ cataacttcgtataatgtatgctatacgaagttatggccccagaggccactggtc]
gIIIPromoter_EcoRI
[5′ atggcgaattctcattgtcggcgcaactat
gIIIPromoter_HinDIII
[5′ gataagctttcattaagactccttattacgcag]

### Example 15

[0535] This example describes construction of an EGF-based monomer library.

[0536] The CaEGF domain library, E3, encodes a protein domain of 36-43 amino acids having the following pattern:
X(5)C1-X(4/6)-C2-X(4,5)-C3-X(8)-C4-X(1)-C5-X(8/12)-C6

[0537] The table below describes for each position which amino acids are encoded in the library based upon the natural diversity of human calcium binding EGF domains:

| | | |
|---|---|---|
| X151 | X(4,6) | X(4,5) |

| | | | | | | | | | | | | | | | | | | |
|---|---|---|---|---|---|---|---|---|---|---|---|---|---|---|---|---|---|---|
| X1 | X2 | X3 | X4 | X5 | C1 | X1 | X2 | X3 | X4 | X5 | X6 | C2 | X1 | X2 | X3 | X4 | X5 | C3 |

| | | | | | | | | | | | | | | | |
|---|---|---|---|---|---|---|---|---|---|---|---|---|---|---|---|
| V | D | V | N | E | V | S | S | P | | | V | S | C | S | |
| T | | I | D | | S | P | G | A | D | A | T | R | D | R | I |
| I | | | | | L | E | H | S | G | I | S | N | N | Q | K |
| E | | | | | A | L | D | | H | L | R | H | S | N | N |
| E | | | | | D | Q | T | | N | P | Q | | | L | R |
| A | | | | | E | V | V | | R | T | P | | | K | S |
| | | | | | G | | | | S | V | N | | | I | T |
| | | | | | K | | | | | | N | | | K | |
| | | | | | N | | | | | | L | | | A | |
| | | | | | R | | | | | | E | | | G | |
| | | | | | S | | | | | | I | | | | |
| | | | | | T | | | | | | H | | | | |
| | | | | | | | | | | | G | | | | |
| | | | | | | | | | | | E | | | | |
| | | | | | | | | | | | D | | | | |
| | | | | | | | | | | | A | | | | |

| | | |
|---|---|---|
| X(8) | X | X(8,12) |

| | | | | | | | | | | | | | | | | | | | | | | | |
|---|---|---|---|---|---|---|---|---|---|---|---|---|---|---|---|---|---|---|---|---|---|---|---|
| X1 | X2 | X3 | X4 | X5 | X6 | X7 | X8 | C4 | X1 | C5 | X1 | X2 | X3 | X4 | X5 | X6 | X7 | X8 | X9 | X10 | X11 | X12 | C6 |

| | | | | | | | | | | | | | | | | | | | | |
|---|---|---|---|---|---|---|---|---|---|---|---|---|---|---|---|---|---|---|---|---|
| V | N | T | V | C | S | T | S | V | V | Q | G | Y | T | G | V | S | | | | |
| Q | D | S | Q | | G | F | R | S | P | P | | F | S | L | T | R | A | G | K | A |
| L | | L | P | | | | Q | R | L | E | | | A | P | Q | N | P | P | N | P |
| K | | I | L | | | | K | O | A | A | | | E | O | P | L | N | S | R | K |
| I | | | E | | | | H | N | H | K | | | K | R | L | I | T | | S | G |
| E | | | A | | | | | K | N | T | | | L | | K | H | | | T | K |
| | | | | | | | | L | R | | | | M | | I | A | | | | K |
| | | | | | | | | K | S | | | | P | | E | E | | | | P |
| | | | | | | | | I | T | | | | Q | | A | G | | | | S |
| | | | | | | | | H | | | | | T | | D | P | | | | T |
| | | | | | | | | G | | | | | V | | G | Q | | | | |
| | | | | | | | | E | | | | | | | N | | | | | |
| | | | | | | | | D | | | | | | | S | | | | | |
| | | | | | | | | | | | | | | | T | | | | | |

[0538] The library of DNA sequences, E3, encoding monomeric calcium binding EGF domains, was created by assembly PCR as described in Stemmer et al., Gene 164:49-53 (1995). The oligonucleotides used in this PCR reaction are in two groups, 1 and 2. They are:

[0539] Group 1:

| | |
|---|---|
| 1. | 5′-AAAAGGCCTCGAGGGCCTGGGTGGCAATGGT-3′ |
| 2. | 5′-CCTGAACCACCACAKHKACCGYKSNBGCACGGAYYCGRCRMACATTC |
| | ATYAAYATCTDYACCATTGCCACCC-3′ |
| 3. | 5′-CCTGAACCACCACAKNTGSCGYYGYKMHSGCACGGAYYCGRCRMACATTC |
| | ATYAAYATCTDYACCATTGCCACCC-3′ |
| 4. | 5′-CCTGAACCACCACAKHKACCGYKSNBGCAARBAYBCGVAHYCWSKBYAC |
| | ATTCATYAAYATCTDYACCATTGCCACCC-3′ |
| 5. | 5′-CCTGAACCACCACAKNTGSCGYYGYKMHSGCAARBAYBCGVAHYCWSKBY |
| | ACATTCATYAAYATCTDYACCATTGCCACCC-3′ |
| 6. | 5′-TGAATTTTCTGTATGAGGTTTTGCTAAACAACTTTCAACAGTTTCGGCCC |
| | CAGAGGCCCTGGAGCCACCTGAACCACCACA-3′ |

[0540] Group 2:

| | |
|---|---|
| 1. | 5′-ACGGTGCCTACCCGTATGATGTTCCGGATTATGCCCCG |
| | GGTGGCAATGGT-3′ |
| 2. | 5′-CCTGAACCACCACAGHKTDBACCGGHAWAGCCTKSCRSGCASHBACAK |
| | YKAWAGCYACCCDSTRWATYTWBACCATTGCCACCC-3′ |
| 3. | 5′-CCTGAACCACCACAKBYKBTKCYGKYCBSABYCNGCDBAWAGCCTK |
| | BGBKGCASHBACAKYKAWAGCYACCCDSTRWATYTWBACCATTGCCACCC-3′ |
| 4. | 5′-AAAAGGCCCCAGAGGCCCCTGAACCACCACA-3′ |

where R = A/G, Y = C/T, M = A/C, K = G/T, S = C/G, W = A/T, B = C/G/T, D = A/G/T, H = A/C/T, V = A/C/G, and N = A/C/G/T.

[0541] Following the separate PCRs of the Group 1 and 2 oligonucleotides, the Group 1 PCR fragments were digested with BpmI and group 2 PCR fragments were digested with BsrDI. Digestion products were purified using Qiagen Qiaquick columns and then ligated together. The ligated DNA was then amplified in a PCR using two primers. These are:

5′-AAAAGGCCTCGAGGGCCTGGGTGGCAATGGT-3′
5′-AAAAGGCCCCAGAGGCCCCTGAACCACCACA-3′

[0542] The PCR products were purified with Qiagen Qiaquick columns and digested with SfiI. The digested product was purified with Qiagen Qiaquick columns. The DNA fragments were ligated into the SfiI restriction sites of phage display vector fuse5-HA(G4S)4, a derivative of fuse5 carrying an in-frame HA-epitope and a glycine, serine flexible linker. The amino acids which comprise the flexible linker are: S-G-G-G-G-S-G-G-G-G-S-G-G-G-G-S-G-G-G-G. The ligation mixture was electroporated into TransforMax™ EC100™ electrocompetent E. coli cells. Transformed E. coli cells were grown overnight at 37° C. in 2×YT medium containing 20 μg/ml tetracycline. The resulting library contained 2×10⁹ independent clones. Phage particles were purified from the culture medium by PEG-precipitation. The titer of the phage was 1.3×10¹²/ml. The sequences of 24 individual clones were determined and these were consistent with the library design.

### Example 16

[0543] This example describes construction of an EGF-based monomer library.

[0544] FIG. 30 illustrates the process of intradomain optimization by recombination. Shown is a three-fragment PCR overlap reaction, which recombines three segments of a single domain relative to each other. One can use two, three, four, five or more fragment overlap reactions in the same way as illustrated. This recombination process has many applications. One application is to recombine a large pool of hundreds of previously selected clones without sequence information. All that is needed for each overlap to work is one known region of (relatively) constant sequence that exists in the same location in each of the clones (fixed site approach). For A domains, typically these clones would have been derived from a library in which 20-25 amino acids distributed over all five inter-cysteine segments were randomized. The intra-domain recombination method can also be performed on a pool of sequence-related monomer domains by standard DNA recombination (e.g., Stemmer, Nature 370:389-391 (1994)) based on random fragmentation and reassembly based on DNA sequence homology, which does not require a fixed overlap site in all of the clones that are to be recombined.

[0545] Another application of this process is to create multiple separate, naïve (meaning unpanned) libraries in each of which only one of the intercysteine loops is randomized, to randomize a different loop in each library. After panning of these libraries separately against the target, the selected clones are then recombined. From each panned library only the randomized segment is amplified by PCR and multiple randomized segments are then combined into a single domain, creating a shuffled library which is panned and/or screened for increased potency. This process can also be used to shuffle a small number of clones of known sequence.

[0546] Any common sequence may be used as cross-over points. For A domains or other cysteine-containing monomers, the cysteine residues are logical places for the crossover. However, there are other ways to determine optimal crossover sites, such as computer modeling. Alternatively, residues with highest entropy, or the least number of intramolecular contacts, may also be good sites for crossovers.

[0547] An exemplary method of generating libraries comprised of proteins with randomized inter-cysteine loops is presented below. In this example, in contrast to the separate loop, separate library approach described above, multiple intercysteine loops are randomized simultaneously in the same library.

[0548] An A domain NNK library encoding a protein domain of 39-45 amino acids having the following pattern was constructed:
C1-X(4,6)-E1-F-R1-C2-A-X(2,4)-G1-R2-C3-I-P-S1-S2-W-V-C4-D1-G2-E2-D2-D3-C5-G3-D4-G4-S3-D5-E3-X(4,6)-C6;
where,
[0550] C1-C6: cysteines;
[0551] X(n): sequence of n amino acids with any residue at each position;
[0552] E1-E3: glutamine;
[0553] F: phenylalanine;
[0554] R1-R2: argenine;
[0555] A: alanine;
[0556] G1-G4: glycine;
[0557] I: isoleucine;
[0558] P: proline;
[0559] S1-S3: serine;
[0560] W: tryptophan;
[0561] V: valine;
[0562] D1-D5: aspartic acid; and
[0563] C1-C3, C2-C5 & C4-C6 form disulfides.

[0564] The library was constructed by creating a library of DNA sequences, containing tyrosine codons (TAT) or variable non-conserved codons (NNK), by assembly PCR as described in Stemmer et al., Gene 164:49-53 (1995). Compared to the native A-domain scaffold and the design that was used to construct library A1 (described previously) this approach: 1) keeps more of the existing residues in place instead of randomizing these potentially critical residues, and 2) inserts a string of amino acids of variable length of all 20 amino acids (NNK codon), such that the average number of inter-cysteine residues is extended beyond that of the natural A domain or the A1 library. The rate of tyrosine residues was increased by including tyrosine codons in the oligonucleotides, because tyrosines were found to be overrepresented in antibody binding sites, presumably because of the large number of different contacts that tyrosine can make. The oligonucleotides used in this PCR reaction are:

| | |
|---|---|
| 1. | 5′ -ATATCCCGGGTCTGGAGGCGTCTGGTGGTTCGTGTNNKNNKNNKNNKGAATTCCGA- 3′ |
| 2. | 5′ -ATATCCCGGGTCTGGAGGCGTCTGGTGGTTCGTGTNNKNNKNNKNNKNNKGAATTCCGA- 3′ |
| 3. | 5′ -ATATCCCGGGTCTGGAGGCGTCTGGTGGTTCGTGTNNKNNKNNKNNKNNKNNKGAATTCCGA- |
| | 3′ |
| 4. | 5′ -ATATCCCGGGTCTGGAGGCGTCTGGTGGTTCGTGTTATNNKNNKNNKGAATTCCGA- 3′ |
| 5. | 5′ -ATATCCCGGGTCTGGAGGCGTCTGGTGGTTCGTGTNNKTATNNKNNKNNKGAATTCCGA- 3′ |
| 6. | 5′ -ATATCCCGGGTCTGGAGGCGTCTGGTGGTTCGTGTNNKTATNNKNNKGAATTCCGA- 3′ |
| 7. | 5′ -ATATCCCGGGTCTGGAGGCGTCTGGTGGTTCGTGTNNKNNKTATNNKGAATTCCGA- 3′ |
| 8. | 5′ -ATATCCCGGGTCTGGAGGCGTCTGGTGGTTCGTGTNNKNNKNNKTATGAATTCCGA- 3′ |
| 9. | 5′ -ATATCCCGGGTCTGGAGGCGTCTGGTGGTTCGTGTNNKNNKNNKTATNNKGAATTCCGA- 3′ |
| 10. | 5′ -ATACCCAAGAAGACGGTATACATCGTCCMNNMNNTGCACATCGGAATTC- 3′ |
| 11. | 5′ -ATACCCAAGAAGACGGTATACATCGTCCMNNMNNMNNTGCACATCGGAATTC- 3′ |
| 12. | 5′ -ATACCCAAGAAGACGGTATACATCGTCCMNNMNNMNNMNNTGCACATCGGAATTC- 3′ |
| 13. | 5′ -ATACCCAAGAAGACGGTATACATCGTCCATAMNNMNNTGCACATCGGAATTC- 3′ |
| 14. | 5′ -ATACCCAAGAAGACGGTATACATCGTCCMNNATAMNNMNNTGCACATCGGAATTC- 3′ |
| 15. | 5′ -ATACCCAAGAAGACGGTATACATCGTCCMNNATAMNNTGCACATCGGAATTC- 3′ |
| 16. | 5′ -ATACCCAAGAAGACGGTATACATCGTCCMNNMNNATATGCACATCGGAATTC- 3′ |
| 17. | 5′ -ATACCCAAGAAGACGGTATACATCGTCCMNNMNNATAMNNTGCACATCGGAATTC- 3′ |
| 18. | 5′ -ACCGTCTTCTTGGGTATGTGACGGGGAGGACGATTGTGGTGACGGATCTGACGAG- 3′ |
| 19. | 5′ -ATATGGCCCCAGAGGCCTGCAATGATCCACCGCCCCCACAMNNMNNMNNMNNCTCGTCAG |
| | ATCCGT- 3′ |
| 20. | 5′ -ATATGGCCCCAGAGGCCTGCAATGATCCACCGCCCCCACAMNNMNNMNNMNNMNNCTCGTCA |
| | GATCCGT- 3′ |
| 21. | 5′ -ATATGGCCCCAGAGGCCTGCAATGATCCACCGCCCCCACAMNNMNNMNNMNNMNNMNNC |
| | TCGTCAGATCCGT- 3′ |
| 22. | 5′ -ATATGGCCCCAGAGGCCTGCAATGATCCACCGCCCCCACAATAMNNMNNMNNCTCGTC |
| | AGATCCGT- 3′ |
| 23. | 5′ -ATATGGCCCCAGAGGCCTGCAATGATCCACCGCCCCCACAMNNATAMNNMNNMNNCT |
| | CGTCAGATCCGT- 3′ |
| 24. | 5′ -ATATGGCCCCAGAGGCCTGCAATGATCCACCGCCCCCACAMNNATAMNNMNNCTCGT |
| | CAGATCCGT- 3′ |
| 25. | 5′ -ATATGGCCCCAGAGGCCTGCAATGATCCACCGCCCCCACAMNNMNNATAMNNCTCG |
| | TCAGATCCGT- 3′ |
| 26. | 5′ -ATATGGCCCCAGAGGCCTGCAATGATCCACCGCCCCCACAMNNMNNMNNATACTCG |
| | TCAGATCCGT- 3′ |
| 27. | 5′ -ATATGGCCCCAGAGGCCTGCAATGATCCACCGCCCCCACAMNNMNNMNNATAMNNCTCGTCAGATCCGT- 3′ |

where R = A/G, Y = C/T, M = A/C, K = G/T, S = C/G, W = A/T, B = C/G/T, D = A/G/T, H = A/C/T, V = A/C/G, and N = A/C/G/T

[0565] The library was constructed though an initial round of 10 cycles of PCR amplification using a mixture of 4 pools of oligonucleotides, each pool containing 400 pmols of DNA. Pool 1 contained oligonucleotides 1-9, pool 2 contained 10-17, pool 3 contained only 18 and pool 4 contained 19-27. The fully assembled library was obtained through an additional 8 cycles of PCR using pool 1 and 4. The library fragments were digested with XmaI and SfiI. The DNA fragments were ligated into the corresponding restriction sites of phage display vector fuse5-HA, a derivative of fuse5 carrying an in-frame HA-epitope. The ligation mixture was electroporated into TransforMax™ EC100™ electrocompetent E. coli cells resulting in a library of 2×10⁹ individual clones. Transformed E. coli cells were grown overnight at 37° C. in 2×YT medium containing 20 μg/ml tetracycline. Phage particles were purified from the culture medium by PEG-precipitation and a titer of 1.1×10¹³/ml was determined. Sequences of 24 clones were determined and were consistent with the expectations of the library design.

### Example 17

[0566] This example describes optimization of multimers by optimizing monomers and/or linkers for binding to a target.

[0567] FIG. 31 illustrates an approach for optimizing multimer binding to targets, as exemplified with a trimeric multimer. In the figure, first a library of monomers is panned for binding to the target (e.g., BAFF or CD40L or other TNF family members). However, some of the monomers may bind at locations on the target that are far away from each other, such that the domains that bind to these sites cannot be connected by a linker peptide. It is therefore useful to create and screen a large library of homo- or heterotrimers from these monomers before optimization of the monomers. These trimer libraries can be screened, e.g., on phage (typical for heterotrimers created from a large pool of monomers) or made and assayed separately (e.g., for homotrimers). By this method, the best trimer is identified. The assays may include binding assays to a target or agonist or antagonist potency determination of the multimer in functional protein- or cell-based assays.

[0568] The monomeric domain(s) of the single best trimer are then optimized as a second step. Homomultimers are easiest to optimize, since only one domain sequence exists, though heteromultimers may also be synthesized. For homomultimers, an increase in binding by the multimer compared to the monomer is an avidity effect.

[0569] After optimization of the domain sequence itself (e.g., by recombining or NNK randomization) and phage panning, the improved monomers are used to construct a dimer with a linker library. Linker libraries may be formed, e.g., from linkers with an NNK composition and/or variable sequence length.

[0570] After panning of this linker library, the best clones (e.g., determined by potency in the inhibition or other functional assay) are converted into multimers composed of multiple (e.g., two, three, four, five, six, seven, eight, etc.) sequence-optimized domains and length- and sequence-optimized linkers.

[0571] To demonstrate this method, a multimer is optimized for binding to BAFF. The BAFF binding clone, anti-BAFF 2, binds to BAFF with nearly equal affinity as a trimer or as a monomer. The linker sequences that separate the monomers within the trimer are four amino acids in length, which is unusually short. It was proposed that expansion of the linker length between monomers will allow multiple binding contacts of each monomer in the trimer, greatly enhancing the affinity of the trimer compared to the monomer molecule.

[0572] To test this, libraries of linker sequences are created between two monomers, creating potentially higher affinity dimer molecules. The identified optimum linker motif is then used to create a potentially even higher affinity trimer BAFF binding molecule.

[0573] These libraries consist of random codons, NNK, varying in length from 4 to 18 amino acids. The linker oligonucleotides for these libraries are:

| | |
|---|---|
| 1. | 5′-AAAACTGCAATGACNNMNNMNNMNNACAGCCTGCTTCATCCGA-3′ |
| 2. | 5′-AAAACTGCAATGACNNMNNMNNMNNMNNMNNACAGCCTGCTTCATCCGA-3′ |
| 3. | 5′-AAAACTGCAATGACNNMNNMNNMNNMNNMNNMNNMNNACAGCCTGCTTCATCCGA-3′ |
| 4. | 5′AAAACTGCAATGACNNMNNMNNMNNMNNMNNMNNMNNMNNMNNACAGC |
| | CTGCTTCATCCGA-3′ |
| 5. | 5′-AAAACTGCAATGACNNMNNMNNMNNMNNMNNMNNMNNMNNMNNMNNMNNACA |
| | GCCTGCTTCATCCGA-3′ |
| 6. | 5′-AAAACTGCAATGACNNMNNMNNMNNMNNMNNMNNMNNMNNMNNMNNMNN |
| | MNNMNNACAGCCTGCTTCATCCGA-3′ |
| 7. | 5′-AAAACTGCAATGACNNMNNMNNMNNMNNMNNMNNMNNMNNMNNMNNMNNMN |
| | NMNNMNNMNNACAGCCTGCTTCATCCGA-3′ |
| 8. | 5′-AAAACTGCAATGACNNMNNMNNMNNMNNMNNMNNMNNMNNMNNMNNMNNMNN |
| | MNNMNNMNNMNNMNNACAGCCTGCTTCATCCGA-3′ |

[0574] Libraries of these sequences are created by PCR. A generic primer, SfiI (5′-TCAACAGTTTCGGCCCCAGA-3′), is used with the linker oligonucleotides in a PCR with the clone anti-BAFF2 as template. The PCR products are purified with Qiagen Qiaquick columns and then digested with BsrDI. The parent anti-BAFF 2 clone is digested with BpmI. These digests are purified with Qiagen Qiaquick columns and ligated together.

[0575] The ligation is amplified by 10 cycles of PCR with the SfiI primer and the primer BpmI (5′-ATGCCCCGGGTCTGGAGGCGT-3′). After purification with Qiagen Qiaquick columns, the DNAs are digested with XmaI and SfiI. Digestion products are separated on 3% agarose gel and the Dimeric BAFF domain fragments are purified from the gel. The DNA fragments are ligated into the corresponding restriction sites of phage display vector fuse5-HA, a derivative of fuse5 carrying an in-frame HA-epitope. The ligation mixture is electroporated into TransforMax™ EC100™ electrocompetent E. coli cells. Transformed E. coli cells are grown overnight at 37° C. in 2×YT medium containing 20 μg/ml tetracycline. Phage particles are purified from the culture medium by PEG-precipitation and used for panning.

### Example 18

[0576] This example describes a structural analysis of A domains.

[0577] As with virtually all proteins, only a small fraction of the total surface of an A-domain participates in binding a single target. Based on the solution structure of the domain, adjacent residue positions can be identified which are likely to be able to cooperate in binding to a given target. Herein, such groups of adjacent residues are referred to as structural categories. As an example, four such categories have been identified through examination of the A-domain structure, designated Top, Bottom, Loop 1, and Loop 2. By designing libraries which only allow diversity within a given category, the theoretical sequence space allowed by a library can be significantly reduced, allowing for better coverage of the theoretical space by the physical library. Further, in the case of non-overlapping categories such as the Top and Bottom categories, half-domain sequences selected against different targets can be combined into a single sequence which would be able to bind simultaneously or alternatively to the selected targets. In either case, creating binding sites that occupy only half a domain allows for the creation of molecules that are half as large and would have half the number of immunogenic epitopes, reducing the risk of immunogenicity.

[0578] Structural Classification of A-Domain Positions

[0579] A canonical A-domain sequence is shown below with high-diversity positions represented as an X. Positions that belong to either the Top, Bottom, Loop 1, or Loop 2 categories are designated with a star.

[image]

### Example 19

[0580] This example describes intra-domain recombination to identify monomer domains with improved function.

[0581] Monomer sequences were generated by several steps of panning and one step of recombination to identify monomers that bind to either the CD40 ligand or human serum albumin. CD40L and HSA was panned against three different A-domain phage libraries. After two rounds of panning, the eluted phage pools were PCR amplified with two sets of oligonucleotides to produce two overlapping fragments. The two fragments were then fused together and cloned into the phagemid vector, pID, to fuse the products of two-fragment recombination. The recombined libraries (10¹⁰ size each) were then panned two rounds against CD40L and HSA targets using solution panning and streptavidin magnetic bead capture.

[0582] The selected phagemid pools were then recloned into the protein expression vector, pET, a T7 polymerase driven vector, for high protein expression. Almost 1400 clones were screened for anti-CD40L binding monomers by standard ELISA and about 2000 clones were screened for HSA. All clones were unique sequences.

[0583] ELISA plate wells were coated with 0.2 μg of CD40L or 0.5 μg of HAS, and 5 μl of the monomer expression clone lysate was applied to each well. The bound monomers (which were produced as a hemagglutinin (HA) fusion) were then detected by anti-HA-HRP conjugated antibody, developed by horse-radish peroxidase enzyme activity, and read at an OD of 450 nm. The positive clones were selected by comparing the ELISA reading to the existing trimer anti-CD40L 2.2 and were selected and sequenced with the T7 primer. See, FIGS. 33 and 34.

[0584] For the anti-CD40L samples, two anti-CD40L 2.2Ig clones were grown in the same plate with selected monomer clones and processed side by side as the positive control. Two empty pET vector clones transformed were grown and processed as negative controls. The ELISA reading at OD450 and the corresponding clone sequences are shown (FIG. 33).

[0585] The same selection and screen processes apply to HSA. Existing anti-HSA monomer and trimer were used as positive controls, empty pET vector were used as negative controls. Positive binders were selected as those with an ELISA signal equal or better than the anti-HSA trimer (FIG. 34).

[0586] The positive rate of clones with an OD₄₅₀ greater or equal to the anti-CD4OL2.2Ig binding was about 0.7% for CD40L and 0.4% for HSA.

[0587] Identified sequences are listed below:

[0588] Anti-CD40L positive clones after 2 fragments recombination and solution panning

| | | | | | | |
|---|---|---|---|---|---|---|
| pmA2_84 | CRPNQFT | CGNGH | CLPRTWL | CDGVPD | CQDSSDETPIP | CKSSVPTSLQ |
| A5C1 | CQSSQFR | CRDNST | CLPLRLR | CDGVND | CRDGSDESPAL | CGRPGPGATSAPAASLQ |
| pmA2_18 | CPADQFQ | CKNGS | CIPRPLR | CDGVED | CADGSDEGQD | CGRPGPGATSAPAASLQ |
| pmA5_79 | CARDGEFR | CAMNGR | CIPSSWV | CDGEDD | CGDGSDESQVY | CGGGGSLQ |
| A2F10 | CLPSQFP | CQNSSI | CVPPALV | CDGDAD | CGDDSDEAS | CAPPGSLSLQ |
| A1E9 | CAPGEFT | CGNGH | CLSRALR | CDGDDG | CLDNSDEKN | CPQRTSLQ |
| pmA11_40 | CLANECT | CDSGR | CLPLPLV | CDGVPD | CEDDSDEKN | CTKPTSLQ |

[0589] Anti-HSA positive clones after 2 fragments recombination and solution panning

| | | | | | | |
|---|---|---|---|---|---|---|
| A5B_10 | CRPSQFR | CGSGK | CIPQPWG | CDGVPD | CEDNSDETD | CKTPVRTSLQ |
| A5_2_68 | CPASQFR | CENGH | CVPPEWL | CDGVDD | CQDDSDESSAT | CQPRTSLQ |
| A5_8_93 | CAPGQFR | CRNYGT | CISLRWG | CDGVND | CGDGSDEQN | CTPHTSLQ |
| A1_4 | CLANQFK | CESGH | CLPPALV | CDGVDD | CQDSSDEASAN | C |
| A1_34 | CNPTGKFK | CRSGR | CVPRESCR | CDGVDD | CEDNSDEKD | CQPHTSLQ |
| A2_10 | CESSEFQ | CENGH | CLPVPWL | CDGVND | CADGSDEKN | CPKPTSLQ |

[0590] While the foregoing invention has been described in some detail for purposes of clarity and understanding, it will be clear to one skilled in the art from a reading of this disclosure that various changes in form and detail can be made without departing from the true scope of the invention. For example, all the techniques, methods, compositions, apparatus and systems described above can be used in various combinations. All publications, patents, patent applications, or other documents cited in this application are incorporated by reference in their entirety for all purposes to the same extent as if each individual publication, patent, patent application, or other document were individually indicated to be incorporated by reference for all purposes.

The application's sequence listing, which the Patent Office published only in electronic form, follows.

SEQUENCE LISTING (665 sequences)

SEQ ID NO: 1 - protein, 37 aa, Artificial Sequence
  human IDD A domain
CNPGQFACRSGTIQCIPLPWQCDGWATCEDESDEANC

SEQ ID NO: 2 - protein, 35 aa, Artificial Sequence
  human low-density lipoprotein receptor (LDLR) related protein 3 (LRP3) A domain
CQADEFRCDNGKCLPGPWQCNTVDECGDGSDEGNC

SEQ ID NO: 3 - protein, 38 aa, Artificial Sequence
  human low-density lipoprotein receptor (LDLR) related protein 3 (LRP3) A domain
CPGGTFPCSGARSTRCLPVERRCDGLQDCGDGSDEAGC

SEQ ID NO: 4 - protein, 46 aa, Artificial Sequence
  human low-density lipoprotein receptor (LDLR) related protein 3 (LRP3) A domain
CLPWEQPCGSSSDSDGGSLGDQGCFSEPQRCDGWWHCASGRDEQGC

SEQ ID NO: 5 - protein, 37 aa, Artificial Sequence
  human low-density lipoprotein receptor (LDLR) related protein 3 (LRP3) A domain
CPPDQYPCEGGSGLCYTPADRCNNQKSCPDGADEKNC

SEQ ID NO: 6 - protein, 35 aa, Artificial Sequence
  human low-density lipoprotein receptor (LDLR) related protein 3 (LRP3) A domain
CQPGTFHCGTNLCIFETWRCDGQEDCQDGSDEHGC

SEQ ID NO: 7 - protein, 37 aa, Artificial Sequence
  human low-density lipoprotein receptor (LDLR) related protein 5 (LRP5) A domain
CSPDQFACATGEIDCIPGAWRCDGFPECDDQSDEEGC

SEQ ID NO: 8 - protein, 35 aa, Artificial Sequence
  human low-density lipoprotein receptor (LDLR) related protein 5 (LRP5) A domain
CSAAQFPCARGQCVDLRLRCDGEADCQDRSDEVDC

SEQ ID NO: 9 - protein, 35 aa, Artificial Sequence
  human low-density lipoprotein receptor (LDLR) related protein 5 (LRP5) A domain
CLPNQFRCASGQCVLIKQQCDSFPDCIDGSDELMC

SEQ ID NO: 10 - protein, 37 aa, Artificial Sequence
  human low-density lipoprotein receptor (LDLR) related protein 6 (LRP6) A domain
CSPQQFTCFTGEIDCIPVAWRCDGFTECEDHSDELNC

SEQ ID NO: 11 - protein, 35 aa, Artificial Sequence
  human low-density lipoprotein receptor (LDLR) related protein 6 (LRP6) A domain
CSESQFQCASGQCIDGALRCNGDANCQDKSDEKNC

SEQ ID NO: 12 - protein, 35 aa, Artificial Sequence
  human low-density lipoprotein receptor (LDLR) related protein 6 (LRP6) A domain
CLIDQFRCANGQCIGKHKKCDHNVDCSDKSDELDC

SEQ ID NO: 13 - protein, 35 aa, Artificial Sequence
  human ST7 A domain
CACDQFRCGNGKCIPEAWKCNNMDECGDSSDEEIC

SEQ ID NO: 14 - protein, 40 aa, Artificial Sequence
  human ST7 A domain
CAYNQFQCLSRFTKVYTCLPESLKCDGNIDCLDLGDEIDC

SEQ ID NO: 15 - protein, 36 aa, Artificial Sequence
  human ST7 A domain
CLPWEIPCGGNWGCYTEQQRCDGYWHCPNGRDETNC

SEQ ID NO: 16 - protein, 36 aa, Artificial Sequence
  human ST7 A domain
CQKEEFPCSRNGVCYPRSDRCNYQNHCPNGSDEKNC

SEQ ID NO: 17 - protein, 35 aa, Artificial Sequence
  human ST7 A domain
CQPGNFHCKNNRCVFESWVCDSQDDCGDGSDEENC

SEQ ID NO: 18 - protein, 36 aa, Artificial Sequence
  human CORI A domain
CGRGENFLCASGICIPGKLQCNGYNDCDDWSDEAHC

SEQ ID NO: 19 - protein, 35 aa, Artificial Sequence
  human CORI A domain
CSENLFHCHTGKCLNYSLVCDGYDDCGDLSDEQNC

SEQ ID NO: 20 - protein, 36 aa, Artificial Sequence
  human CORI A domain
CNPTTEHRCGDGRCIAMEWVCDGDHDCVDKSDEVNC

SEQ ID NO: 21 - protein, 36 aa, Artificial Sequence
  human CORI A domain
CHSQGLVECRNGQCIPSTFQCDGDEDCKDGSDEENC

SEQ ID NO: 22 - protein, 35 aa, Artificial Sequence
  human CORI A domain
CSPSHFKCRSGQCVLASRRCDGQADCDDDSDEENC

SEQ ID NO: 23 - protein, 37 aa, Artificial Sequence
  human CORI A domain
CKERDLWECPSNKQCLKHTVICDGFPDCPDYMDEKNC

SEQ ID NO: 24 - protein, 35 aa, Artificial Sequence
  human CORI A domain
CQDDELECANHACVSRDLWCDGEADCSDSSDEWDC

SEQ ID NO: 25 - protein, 36 aa, Artificial Sequence
  human TMS2 A domain
CSNSGIECDSSGTCINPSNWCDGVSHCPGGEDENRC

SEQ ID NO: 26 - protein, 35 aa, Artificial Sequence
  human TMS3 A domain
CSGKYRCRSSFKCIELIARCDGVSDCKDGEDEYRC

SEQ ID NO: 27 - protein, 34 aa, Artificial Sequence
  human MAT A domain
CPGQFTCRTGRCIRKELRCDGWADCTDHSDELNC

SEQ ID NO: 28 - protein, 36 aa, Artificial Sequence
  human MAT A domain
CDAGHQFTCKNKFCKPLFWVCDSVNDCGDNSDEQGC

SEQ ID NO: 29 - protein, 35 aa, Artificial Sequence
  human MAT A domain
CPAQTFRCSNGKCLSKSQQCNGKDDCGDGSDEASC

SEQ ID NO: 30 - protein, 36 aa, Artificial Sequence
  human MAT A domain
CTKHTYRCLNGLCLSKGNPECDGKEDCSDGSDEKDC

SEQ ID NO: 31 - protein, 38 aa, Artificial Sequence
  human ENTK A domain
CLPGSSPCTDALTCIKADLFCDGEVNCPDGSDEDNKMC

SEQ ID NO: 32 - protein, 35 aa, Artificial Sequence
  human ENTK A domain
CKADHFQCKNGECVPLVNLCDGHLHCEDGSDEADC

SEQ ID NO: 33 - protein, 35 aa, Artificial Sequence
  human HAI1 A domain
CQPTQFRCSNGCCIDSFLECDDTPNCPDASDEAAC

SEQ ID NO: 34 - protein, 42 aa, Artificial Sequence
  human CFAI A domain
CYTQKADSPMDDFFQCVNGKYISQMKACDGINDCGDQSDELC

SEQ ID NO: 35 - protein, 35 aa, Artificial Sequence
  human CFAI A domain
CQGKGFHCKSGVCIPSQYQCNGEVDCITGEDEVGC

SEQ ID NO: 36 - protein, 34 aa, Artificial Sequence
  human CO6 A domain
CKNKFRCDSGRCIARKLECNGENDCGDNSDERDC

SEQ ID NO: 37 - protein, 35 aa, Artificial Sequence
  human CO7 A domain
CGERFRCFSGQCISKSLVCNGDSDCDEDSADEDRC

SEQ ID NO: 38 - protein, 35 aa, Artificial Sequence
  human CO8A A domain
CGQDFQCKETGRCLKRHLVCNGDQDCLDGSDEDDC

SEQ ID NO: 39 - protein, 34 aa, Artificial Sequence
  human CO8B A domain
CEGFVCAQTGRCVNRRLLCNGDNDCGDQSDEANC

SEQ ID NO: 40 - protein, 34 aa, Artificial Sequence
  human CO9 A domain
CGNDFQCSTGRCIKMRLRCNGDNDCGDFSDEDDC

SEQ ID NO: 41 - protein, 36 aa, Artificial Sequence
  human PERL A domain
CTEAEFACHSYNECVALEYRCDRRPDCRDMSDELNC

SEQ ID NO: 42 - protein, 35 aa, Artificial Sequence
  human PERL A domain
CGPQEAACRNGHCIPRDYLCDGQEDCEDGSDELDC

SEQ ID NO: 43 - protein, 35 aa, Artificial Sequence
  human PERL A domain
CEPNEFPCGNGHCALKLWRCDGDFDCEDRTDEANC

SEQ ID NO: 44 - protein, 36 aa, Artificial Sequence
  human PERL A domain
CGPTQFRCVSTNMCIPASFHCDEESDCPDRSDEFGC

SEQ ID NO: 45 - protein, 35 aa, Artificial Sequence
  human SORL A domain
CLRNQYRCSNGNCINSIWWCDFDNDCGDMSDERNC

SEQ ID NO: 46 - protein, 37 aa, Artificial Sequence
  human SORL A domain
CDLDTQFRCQESGTCIPLSYKCDLEDDCGDNSDESHC

SEQ ID NO: 47 - protein, 35 aa, Artificial Sequence
  human SORL A domain
CRSDEYNCSSGMCIRSSWVCDGDNDCRDWSDEANC

SEQ ID NO: 48 - protein, 37 aa, Artificial Sequence
  human SORL A domain
CEASNFQCRNGHCIPQRWACDGDTDCQDGSDEDPVNC

SEQ ID NO: 49 - protein, 33 aa, Artificial Sequence
  human SORL A domain
CNGFRCPNGTCIPSSKHCDGLRDCSDGSDEQHC

SEQ ID NO: 50 - protein, 41 aa, Artificial Sequence
  human SORL A domain
CTHFMDFVCKNRQQCLFHSMVCDGIIQCRDGSDEDAAFAGC

SEQ ID NO: 51 - protein, 35 aa, Artificial Sequence
  human SORL A domain
CDEFGFQCQNGVCISLIWKCDGMDDCGDYSDEANC

SEQ ID NO: 52 - protein, 36 aa, Artificial Sequence
  human SORL A domain
CSRYFQFRCENGHCIPNRWKCDRENDCGDWSDEKDC

SEQ ID NO: 53 - protein, 35 aa, Artificial Sequence
  human SORL A domain
CLPNYYRCSSGTCVMDTWVCDGYRDCADGSDEEAC

SEQ ID NO: 54 - protein, 36 aa, Artificial Sequence
  human SORL A domain
CDRFEFECHQPKTCIPNWKRCDGHQDCQDGRDEANC

SEQ ID NO: 55 - protein, 36 aa, Artificial Sequence
  human SORL A domain
CMSREFQCEDGEACIVLSERCDGFLDCSDESDEKAC

SEQ ID NO: 56 - protein, 35 aa, Artificial Sequence
  human ApoER2 A domain
CEKDQFQCRNERCIPSVWRCDEDDDCLDHSDEDDC

SEQ ID NO: 57 - protein, 37 aa, Artificial Sequence
  human ApoER2 A domain
CADSDFTCDNGHCIHERWKCDGEEECPDGSDESEATC

SEQ ID NO: 58 - protein, 37 aa, Artificial Sequence
  human ApoER2 A domain
CPAEKLSCGPTSHKCVPASWRCDGEKDCEGGADEAGC

SEQ ID NO: 59 - protein, 35 aa, Artificial Sequence
  human ApoER2 A domain
CAPHEFQCGNRSCLAAVFVCDGDDDCGDGSDERGC

SEQ ID NO: 60 - protein, 40 aa, Artificial Sequence
  human ApoER2 A domain
CGPREFRCGGDGGGACIPERWVCDRQFDCEDRSDEAAELC

SEQ ID NO: 61 - protein, 36 aa, Artificial Sequence
  human ApoER2 A domain
CATVSQFACRSGECVHLGWRCDGDRDCKDKSDEADC

SEQ ID NO: 62 - protein, 35 aa, Artificial Sequence
  human ApoER2 A domain
CRGDEFQCGDGTCVLAIKHCNQEQDCPDGSDEAGC

SEQ ID NO: 63 - protein, 37 aa, Artificial Sequence
  human low-density lipoprotein receptor (LDLR) A domain
CERNEFQCQDGKCISYKWVCDGSAECQDGSDESQETC

SEQ ID NO: 64 - protein, 37 aa, Artificial Sequence
  human low-density lipoprotein receptor (LDLR) A domain
CKSGDFSCGGRVNRCIPQFWRCDGQVDCDNGSDEQGC

SEQ ID NO: 65 - protein, 35 aa, Artificial Sequence
  human low-density lipoprotein receptor (LDLR) A domain
CSQDEFRCHDGKCISRQFVCDSDRDCLDGSDEASC

SEQ ID NO: 66 - protein, 37 aa, Artificial Sequence
  human low-density lipoprotein receptor (LDLR) A domain
CGPASFQCNSSTCIPQLWACDNDPDCEDGSDEWPQRC

SEQ ID NO: 67 - protein, 35 aa, Artificial Sequence
  human low-density lipoprotein receptor (LDLR) A domain
CSAFEFHCLSGECIHSSWRCDGGPDCKDKSDEENC

SEQ ID NO: 68 - protein, 35 aa, Artificial Sequence
  human low-density lipoprotein receptor (LDLR) A domain
CRPDEFQCSDGNCIHGSRQCDREYDCKDMSDEVGC

SEQ ID NO: 69 - protein, 38 aa, Artificial Sequence
  human low-density lipoprotein receptor (LDLR) A domain
CEGPNKFKCHSGECITLDKVCNMARDCRDWSDEPIKEC

SEQ ID NO: 70 - protein, 35 aa, Artificial Sequence
  human LDVR A domain
CEPSQFQCTNGRCITLLWKCDGDEDCVDGSDEKNC

SEQ ID NO: 71 - protein, 37 aa, Artificial Sequence
  human LDVR A domain
CAESDFVCNNGQCVPSRWKCDGDPDCEDGSDESPEQC

SEQ ID NO: 72 - protein, 37 aa, Artificial Sequence
  human LDVR A domain
CRIHEISCGAHSTQCIPVSWRCDGENDCDSGEDEENC

SEQ ID NO: 73 - protein, 35 aa, Artificial Sequence
  human LDVR A domain
CSPDEFTCSSGRCISRNFVCNGQDDCSDGSDELDC

SEQ ID NO: 74 - protein, 37 aa, Artificial Sequence
  human LDVR A domain
CGAHEFQCSTSSCIPISWVCDDDADCSDQSDESLEQC

SEQ ID NO: 75 - protein, 35 aa, Artificial Sequence
  human LDVR A domain
CPASEIQCGSGECIHKKWRCDGDPDCKDGSDEVNC

SEQ ID NO: 76 - protein, 35 aa, Artificial Sequence
  human LDVR A domain
CRPDQFECEDGSCIHGSRQCNGIRDCVDGSDEVNC

SEQ ID NO: 77 - protein, 38 aa, Artificial Sequence
  human LDVR A domain
CLGPGKFKCRSGECIDISKVCNQEQDCRDWSDEPLKEC

SEQ ID NO: 78 - protein, 38 aa, Artificial Sequence
  human low-density lipoprotein receptor (LDLR) related protein 1 (LRP1) A domain
CSPKQFACRDQITCISKGWRCDGERDCPDGSDEAPEIC

SEQ ID NO: 79 - protein, 37 aa, Artificial Sequence
  human low-density lipoprotein receptor (LDLR) related protein 1 (LRP1) A domain
CQPNEHNCLGTELCVPMSRLCNGVQDCMDGSDEGPHC

SEQ ID NO: 80 - protein, 37 aa, Artificial Sequence
  human low-density lipoprotein receptor (LDLR) related protein 1 (LRP1) A domain
CQPGEFACANSRCIQERWKCDGDNDCLDNSDEAPALC

SEQ ID NO: 81 - protein, 37 aa, Artificial Sequence
  human low-density lipoprotein receptor (LDLR) related protein 1 (LRP1) A domain
CPSDRFKCENNRCIPNRWLCDGDNDCGNSEDESNATC

SEQ ID NO: 82 - protein, 36 aa, Artificial Sequence
  human low-density lipoprotein receptor (LDLR) related protein 1 (LRP1) A domain
CPPNQFSCASGRCIPISWTCDLDDDCGDRSDESASC

SEQ ID NO: 83 - protein, 36 aa, Artificial Sequence
  human low-density lipoprotein receptor (LDLR) related protein 1 (LRP1) A domain
CFPLTQFTCNNGRCININWRCDNDNDCGDNSDEAGC

SEQ ID NO: 84 - protein, 37 aa, Artificial Sequence
  human low-density lipoprotein receptor (LDLR) related protein 1 (LRP1) A domain
CSSTQFKCNSGRCIPEHWTCDGDNDCGDYSDETHANC

SEQ ID NO: 85 - protein, 36 aa, Artificial Sequence
  human low-density lipoprotein receptor (LDLR) related protein 1 (LRP1) A domain
CHTDEFQCRLDGLCIPLRWRCDGDTDCMDSSDEKSC

SEQ ID NO: 86 - protein, 37 aa, Artificial Sequence
  human low-density lipoprotein receptor (LDLR) related protein 1 (LRP1) A domain
CDPSVKFGCKDSARCISKAWVCDGDNDCEDNSDEENC

SEQ ID NO: 87 - protein, 38 aa, Artificial Sequence
  human low-density lipoprotein receptor (LDLR) related protein 1 (LRP1) A domain
CRPPSHPCANNTSVCLPPDKLCDGNDDCGDGSDEGELC

SEQ ID NO: 88 - protein, 38 aa, Artificial Sequence
  human low-density lipoprotein receptor (LDLR) related protein 1 (LRP1) A domain
CRAQDEFECANGECINFSLTCDGVPHCKDKSDEKPSYC

SEQ ID NO: 89 - protein, 35 aa, Artificial Sequence
  human low-density lipoprotein receptor (LDLR) related protein 1 (LRP1) A domain
CKKTFRQCSNGRCVSNMLWCNGADDCGDGSDEIPC

SEQ ID NO: 90 - protein, 35 aa, Artificial Sequence
  human low-density lipoprotein receptor (LDLR) related protein 1 (LRP1) A domain
CGVGEFRCRDGTCIGNSSRCNQFVDCEDASDEMNC

SEQ ID NO: 91 - protein, 45 aa, Artificial Sequence
  human low-density lipoprotein receptor (LDLR) related protein 1 (LRP1) A domain
CSSYFRLGVKGVLFQPCERTSLCYAPSWVCDGANDCGDYSDERDC

SEQ ID NO: 92 - protein, 35 aa, Artificial Sequence
  human low-density lipoprotein receptor (LDLR) related protein 1 (LRP1) A domain
CPLNYFACPSGRCIPMSWTCDKEDDCEHGEDETHC

SEQ ID NO: 93 - protein, 36 aa, Artificial Sequence
  human low-density lipoprotein receptor (LDLR) related protein 1 (LRP1) A domain
CSEAQFECQNHRCISKQWLCDGSDDCGDGSDEAAHC

SEQ ID NO: 94 - protein, 39 aa, Artificial Sequence
  human low-density lipoprotein receptor (LDLR) related protein 1 (LRP1) A domain
CGPSSFSCPGTHVCVPERWLCDGDKDCADGADESIAAGC

SEQ ID NO: 95 - protein, 36 aa, Artificial Sequence
  human low-density lipoprotein receptor (LDLR) related protein 1 (LRP1) A domain
CDDREFMCQNRQCIPKHFVCDHDRDCADGSDESPEC

SEQ ID NO: 96 - protein, 40 aa, Artificial Sequence
  human low-density lipoprotein receptor (LDLR) related protein 1 (LRP1) A domain
CGPSEFRCANGRCLSSRQWECDGENDCHDQSDEAPKNPHC

SEQ ID NO: 97 - protein, 36 aa, Artificial Sequence
  human low-density lipoprotein receptor (LDLR) related protein 1 (LRP1) A domain
CNASSQFLCSSGRCVAEALLCNGQDDCGDSSDERGC

SEQ ID NO: 98 - protein, 36 aa, Artificial Sequence
  human low-density lipoprotein receptor (LDLR) related protein 1 (LRP1) A domain
CTASQFVCKNDKCIPFWWKCDTEDDCGDHSDEPPDC

SEQ ID NO: 99 - protein, 35 aa, Artificial Sequence
  human low-density lipoprotein receptor (LDLR) related protein 1 (LRP1) A domain
CRPGQFQCSTGICTNPAFICDGDNDCQDNSDEANC

SEQ ID NO: 100 - protein, 36 aa, Artificial Sequence
  human low-density lipoprotein receptor (LDLR) related protein 1 (LRP1) A domain
CLPSQFKCTNTNRCIPGIFRCNGQDNCGDGEDERDC

SEQ ID NO: 101 - protein, 37 aa, Artificial Sequence
  human low-density lipoprotein receptor (LDLR) related protein 1 (LRP1) A domain
CAPNQFQCSITKRCIPRVWVCDRDNDCVDGSDEPANC

SEQ ID NO: 102 - protein, 38 aa, Artificial Sequence
  human low-density lipoprotein receptor (LDLR) related protein 1 (LRP1) A domain
CGVDEFRCKDSGRCIPARWKCDGEDDCGDGSDEPKEEC

SEQ ID NO: 103 - protein, 35 aa, Artificial Sequence
  human low-density lipoprotein receptor (LDLR) related protein 1 (LRP1) A domain
CEPYQFRCKNNRCVPGRWQCDYDNDCGDNSDEESC

SEQ ID NO: 104 - protein, 35 aa, Artificial Sequence
  human low-density lipoprotein receptor (LDLR) related protein 1 (LRP1) A domain
CSESEFSCANGRCIAGRWKCDGDHDCADGSDEKDC

SEQ ID NO: 105 - protein, 35 aa, Artificial Sequence
  human low-density lipoprotein receptor (LDLR) related protein 1 (LRP1) A domain
CDMDQFQCKSGHCIPLRWRCDADADCMDGSDEEAC

SEQ ID NO: 106 - protein, 37 aa, Artificial Sequence
  human low-density lipoprotein receptor (LDLR) related protein 1 (LRP1) A domain
CPLDEFQCNNTLCKPLAWKCDGEDDCGDNSDENPEEC

SEQ ID NO: 107 - protein, 37 aa, Artificial Sequence
  human low-density lipoprotein receptor (LDLR) related protein 1 (LRP1) A domain
CPPNRPFRCKNDRVCLWIGRQCDGTDNCGDGTDEEDC

SEQ ID NO: 108 - protein, 36 aa, Artificial Sequence
  human low-density lipoprotein receptor (LDLR) related protein 1 (LRP1) A domain
CKDKKEFLCRNQRCLSSSLRCNMFDDCGDGSDEEDC

SEQ ID NO: 109 - protein, 35 aa, Artificial Sequence
  human low-density lipoprotein receptor (LDLR) related protein 2 (LRP2) A domain
CDSAHFRCGSGHCIPADWRCDGTKDCSDDADEIGC

SEQ ID NO: 110 - protein, 37 aa, Artificial Sequence
  human low-density lipoprotein receptor (LDLR) related protein 2 (LRP2) A domain
CQQGYFKCQSEGQCIPSSWVCDQDQDCDDGSDERQDC

SEQ ID NO: 111 - protein, 35 aa, Artificial Sequence
  human low-density lipoprotein receptor (LDLR) related protein 2 (LRP2) A domain
CSSHQITCSNGQCIPSEYRCDHVRDCPDGADENDC

SEQ ID NO: 112 - protein, 33 aa, Artificial Sequence
  human low-density lipoprotein receptor (LDLR) related protein 2 (LRP2) A domain
CEQLTCDNGACYNTSQKCDWKVDCRDSSDEINC

SEQ ID NO: 113 - protein, 35 aa, Artificial Sequence
  human low-density lipoprotein receptor (LDLR) related protein 2 (LRP2) A domain
CLHNEFSCGNGECIPRAYVCDHDNDCQDGSDEHAC

SEQ ID NO: 114 - protein, 35 aa, Artificial Sequence
  human low-density lipoprotein receptor (LDLR) related protein 2 (LRP2) A domain
CGGYQFTCPSGRCIYQNWVCDGEDDCKDNGDEDGC

SEQ ID NO: 115 - protein, 42 aa, Artificial Sequence
  human low-density lipoprotein receptor (LDLR) related protein 2 (LRP2) A domain
CSPREWSCPESGRCISIYKVCDGILDCPGREDENNTSTGKYC

SEQ ID NO: 116 - protein, 35 aa, Artificial Sequence
  human low-density lipoprotein receptor (LDLR) related protein 2 (LRP2) A domain
CGLFSFPCKNGRCVPNYYLCDGVDDCHDNSDEQLC

SEQ ID NO: 117 - protein, 35 aa, Artificial Sequence
  human low-density lipoprotein receptor (LDLR) related protein 2 (LRP2) A domain
CSSSAFTCGHGECIPAHWRCDKRNDCVDGSDEHNC

SEQ ID NO: 118 - protein, 35 aa, Artificial Sequence
  human low-density lipoprotein receptor (LDLR) related protein 2 (LRP2) A domain
CLDTQYTCDNHQCISKNWVCDTDNDCGDGSDEKNC

SEQ ID NO: 119 - protein, 35 aa, Artificial Sequence
  human low-density lipoprotein receptor (LDLR) related protein 2 (LRP2) A domain
CQPSQFNCPNHRCIDLSFVCDGDKDCVDGSDEVGC

SEQ ID NO: 120 - protein, 36 aa, Artificial Sequence
  human low-density lipoprotein receptor (LDLR) related protein 2 (LRP2) A domain
CTASQFKCASGDKCIGVTNRCDGVFDCSDNSDEAGC

SEQ ID NO: 121 - protein, 37 aa, Artificial Sequence
  human low-density lipoprotein receptor (LDLR) related protein 2 (LRP2) A domain
CHSDEFQCQEDGICIPNFWECDGHPDCLYGSDEHNAC

SEQ ID NO: 122 - protein, 35 aa, Artificial Sequence
  human low-density lipoprotein receptor (LDLR) related protein 2 (LRP2) A domain
CPSSYFHCDNGNCIHRAWLCDRDNDCGDMSDEKDC

SEQ ID NO: 123 - protein, 37 aa, Artificial Sequence
  human low-density lipoprotein receptor (LDLR) related protein 2 (LRP2) A domain
CPSWQWQCLGHNICVNLSVVCDGIFDCPNGTDESPLC

SEQ ID NO: 124 - protein, 37 aa, Artificial Sequence
  human low-density lipoprotein receptor (LDLR) related protein 2 (LRP2) A domain
CGASSFTCSNGRCISEEWKCDNDNDCGDGSDEMESVC

SEQ ID NO: 125 - protein, 35 aa, Artificial Sequence
  human low-density lipoprotein receptor (LDLR) related protein 2 (LRP2) A domain
CSPTAFTCANGRCVQYSYRCDYYNDCGDGSDEAGC

SEQ ID NO: 126 - protein, 38 aa, Artificial Sequence
  human low-density lipoprotein receptor (LDLR) related protein 2 (LRP2) A domain
CNATTEFMCNNRRCIPREFICNGVDNCHDNNTSDEKNC

SEQ ID NO: 127 - protein, 38 aa, Artificial Sequence
  human low-density lipoprotein receptor (LDLR) related protein 2 (LRP2) A domain
CQSGYTKCHNSNICIPRVYLCDGDNDCGDNSDENPTYC

SEQ ID NO: 128 - protein, 36 aa, Artificial Sequence
  human low-density lipoprotein receptor (LDLR) related protein 2 (LRP2) A domain
CSSSEFQCASGRCIPQHWYCDQETDCFDASDEPASC

SEQ ID NO: 129 - protein, 38 aa, Artificial Sequence
  human low-density lipoprotein receptor (LDLR) related protein 2 (LRP2) A domain
CLADEFKCDGGRCIPSEWICDGDNDCGDMSDEDKRHQC

SEQ ID NO: 130 - protein, 41 aa, Artificial Sequence
  human low-density lipoprotein receptor (LDLR) related protein 2 (LRP2) A domain
CSDSEFLCVNDRPPDRRCIPQSWVCDGDVDCTDGYDENQNC

SEQ ID NO: 131 - protein, 35 aa, Artificial Sequence
  human low-density lipoprotein receptor (LDLR) related protein 2 (LRP2) A domain
CSENEFTCGYGLCIPKIFRCDRHNDCGDYSDERGC

SEQ ID NO: 132 - protein, 37 aa, Artificial Sequence
  human low-density lipoprotein receptor (LDLR) related protein 2 (LRP2) A domain
CQQNQFTCQNGRCISKTFVCDEDNDCGDGSDELMHLC

SEQ ID NO: 133 - protein, 35 aa, Artificial Sequence
  human low-density lipoprotein receptor (LDLR) related protein 2 (LRP2) A domain
CPPHEFKCDNGRCIEMMKLCNHLDDCLDNSDEKGC

SEQ ID NO: 134 - protein, 37 aa, Artificial Sequence
  human low-density lipoprotein receptor (LDLR) related protein 2 (LRP2) A domain
CSSTQFLCANNEKCIPIWWKCDGQKDCSDGSDELALC

SEQ ID NO: 135 - protein, 37 aa, Artificial Sequence
  human low-density lipoprotein receptor (LDLR) related protein 2 (LRP2) A domain
CRLGQFQCSDGNCTSPQTLCNAHQNCPDGSDEDRLLC

SEQ ID NO: 136 - protein, 37 aa, Artificial Sequence
  human low-density lipoprotein receptor (LDLR) related protein 2 (LRP2) A domain
CDSNEWQCANKRCIPESWQCDTFNDCEDNSDEDSSHC

SEQ ID NO: 137 - protein, 37 aa, Artificial Sequence
  human low-density lipoprotein receptor (LDLR) related protein 2 (LRP2) A domain
CRPGQFRCANGRCIPQAWKCDVDNDCGDHSDEPIEEC

SEQ ID NO: 138 - protein, 37 aa, Artificial Sequence
  human low-density lipoprotein receptor (LDLR) related protein 2 (LRP2) A domain
CDNFTEFSCKTNYRCIPKWAVCNGVDDCRDNSDEQGC

SEQ ID NO: 139 - protein, 36 aa, Artificial Sequence
  human low-density lipoprotein receptor (LDLR) related protein 2 (LRP2) A domain
CHPVGDFRCKNHHCIPLRWQCDGQNDCGDNSDEENC

SEQ ID NO: 140 - protein, 35 aa, Artificial Sequence
  human low-density lipoprotein receptor (LDLR) related protein 2 (LRP2) A domain
CTESEFRCVNQQCIPSRWICDHYNDCGDNSDERDC

SEQ ID NO: 141 - protein, 35 aa, Artificial Sequence
  human low-density lipoprotein receptor (LDLR) related protein 2 (LRP2) A domain
CHPEYFQCTSGHCVHSELKCDGSADCLDASDEADC

SEQ ID NO: 142 - protein, 37 aa, Artificial Sequence
  human low-density lipoprotein receptor (LDLR) related protein 2 (LRP2) A domain
CQATMFECKNHVCIPPYWKCDGDDDCGDGSDEELHLC

SEQ ID NO: 143 - protein, 38 aa, Artificial Sequence
  human low-density lipoprotein receptor (LDLR) related protein 2 (LRP2) A domain
CNSPNRFRCDNNRCIYSHEVCNGVDDCGDGTDETEEHC

SEQ ID NO: 144 - protein, 35 aa, Artificial Sequence
  human low-density lipoprotein receptor (LDLR) related protein 2 (LRP2) A domain
CTEYEYKCGNGHCIPHDNVCDDADDCGDWSDELGC

SEQ ID NO: 145 - protein, 38 aa, Artificial Sequence
  human low-density lipoprotein receptor (LDLR) related protein 1B (LR1B) A domain
CDPGEFLCHDHVTCVSQSWLCDGDPDCPDDSDESLDTC

SEQ ID NO: 146 - protein, 37 aa, Artificial Sequence
  human low-density lipoprotein receptor (LDLR) related protein 1B (LR1B) A domain
CPLNHIACLGTNKCVHLSQLCNGVLDCPDGYDEGVHC

SEQ ID NO: 147 - protein, 37 aa, Artificial Sequence
  human low-density lipoprotein receptor (LDLR) related protein 1B (LR1B) A domain
CKAGEFRCKNRHCIQARWKCDGDDDCLDGSDEDSVNC

SEQ ID NO: 148 - protein, 37 aa, Artificial Sequence
  human low-density lipoprotein receptor (LDLR) related protein 1B (LR1B) A domain
CPDDQFKCQNNRCIPKRWLCDGANDCGSNEDESNQTC

SEQ ID NO: 149 - protein, 36 aa, Artificial Sequence
  human low-density lipoprotein receptor (LDLR) related protein 1B (LR1B) A domain
CQVDQFSCGNGRCIPRAWLCDREDDCGDQTDEMASC

SEQ ID NO: 150 - protein, 36 aa, Artificial Sequence
  human low-density lipoprotein receptor (LDLR) related protein 1B (LR1B) A domain
CEPLTQFVCKSGRCISSKWHCDSDDDCGDGSDEVGC

SEQ ID NO: 151 - protein, 37 aa, Artificial Sequence
  human low-density lipoprotein receptor (LDLR) related protein 1B (LR1B) A domain
CFDNQFRCSSGRCIPGHWACDGDNDCGDFSDEAQINC

SEQ ID NO: 152 - protein, 36 aa, Artificial Sequence
  human low-density lipoprotein receptor (LDLR) related protein 1B (LR1B) A domain
CNGNEFQCHPDGNCVPDLWRCDGEKDCEDGSDEKGC

SEQ ID NO: 153 - protein, 37 aa, Artificial Sequence
  human low-density lipoprotein receptor (LDLR) related protein 1B (LR1B) A domain
CDHKTKFSCWSTGRCINKAWVCDGDIDCEDQSDEDDC

SEQ ID NO: 154 - protein, 38 aa, Artificial Sequence
  human low-density lipoprotein receptor (LDLR) related protein 1B (LR1B) A domain
CGPPKHPCANDTSVCLQPEKLCNGKKDCPDGSDEGYLC

SEQ ID NO: 155 - protein, 38 aa, Artificial Sequence
  human low-density lipoprotein receptor (LDLR) related protein 1B (LR1B) A domain
CNAYSEFECGNGECIDYQLTCDGIPHCKDKSDEKLLYC

SEQ ID NO: 156 - protein, 35 aa, Artificial Sequence
  human low-density lipoprotein receptor (LDLR) related protein 1B (LR1B) A domain
CRRGFKPCYNRRCIPHGKLCDGENDCGDNSDELDC

SEQ ID NO: 157 - protein, 35 aa, Artificial Sequence
  human low-density lipoprotein receptor (LDLR) related protein 1B (LR1B) A domain
CATVEFRCADGTCIPRSARCNQNIDCADASDEKNC

SEQ ID NO: 158 - protein, 45 aa, Artificial Sequence
  human low-density lipoprotein receptor (LDLR) related protein 1B (LR1B) A domain
CTHFYKLGVKTTGFIRCNSTSLCVLPTWICDGSNDCGDYSDELKC

SEQ ID NO: 159 - protein, 35 aa, Artificial Sequence
  human low-density lipoprotein receptor (LDLR) related protein 1B (LR1B) A domain
CEENYFSCPSGRCILNTWICDGQKDCEDGRDEFHC

SEQ ID NO: 160 - protein, 37 aa, Artificial Sequence
  human low-density lipoprotein receptor (LDLR) related protein 1B (LR1B) A domain
CSWNQFACSAQKCISKHWICDGEDDCGDGLDESDSIC

SEQ ID NO: 161 - protein, 39 aa, Artificial Sequence
  human low-density lipoprotein receptor (LDLR) related protein 1B (LR1B) A domain
CAADMFSCQGSRACVPRHWLCDGERDCPDGSDELSTAGC

SEQ ID NO: 162 - protein, 36 aa, Artificial Sequence
  human low-density lipoprotein receptor (LDLR) related protein 1B (LR1B) A domain
CDENAFMCHNKVCIPKQFVCDHDDDCGDGSDESPQC

SEQ ID NO: 163 - protein, 40 aa, Artificial Sequence
  human low-density lipoprotein receptor (LDLR) related protein 1B (LR1B) A domain
CGTEEFSCADGRCLLNTQWQCDGDFDCPDHSDEAPLNPKC

SEQ ID NO: 164 - protein, 35 aa, Artificial Sequence
  human low-density lipoprotein receptor (LDLR) related protein 1B (LR1B) A domain
CNSSFFMCKNGRCIPSGGLCDNKDDCGDGSDERNC

SEQ ID NO: 165 - protein, 36 aa, Artificial Sequence
  human low-density lipoprotein receptor (LDLR) related protein 1B (LR1B) A domain
CTASQFRCKTDKCIPFWWKCDTVDDCGDGSDEPDDC

SEQ ID NO: 166 - protein, 35 aa, Artificial Sequence
  human low-density lipoprotein receptor (LDLR) related protein 1B (LR1B) A domain
CQPGRFQCGTGLCALPAFICDGENDCGDNSDELNC

SEQ ID NO: 167 - protein, 36 aa, Artificial Sequence
  human low-density lipoprotein receptor (LDLR) related protein 1B (LR1B) A domain
CLSGQFKCTKNQKCIPVNLRCNGQDDCGDEEDERDC

SEQ ID NO: 168 - protein, 36 aa, Artificial Sequence
  human low-density lipoprotein receptor (LDLR) related protein 1B (LR1B) A domain
CSPDYFQCKTTKHCISKLWVCDEDPDCADASDEANC

SEQ ID NO: 169 - protein, 35 aa, Artificial Sequence
  human low-density lipoprotein receptor (LDLR) related protein 1B (LR1B) A domain
CGPHEFQCKNNNCIPDHWRCDSQNDCSDNSDEENC

SEQ ID NO: 170 - protein, 35 aa, Artificial Sequence
  human low-density lipoprotein receptor (LDLR) related protein 1B (LR1B) A domain
CTLKDFLCANGDCVSSRFWCDGDFDCADGSDERNC

SEQ ID NO: 171 - protein, 35 aa, Artificial Sequence
  human low-density lipoprotein receptor (LDLR) related protein 1B (LR1B) A domain
CSKDQFRCSNGQCIPAKWKCDGHEDCKYGEDEKSC

SEQ ID NO: 172 - protein, 35 aa, Artificial Sequence
  human low-density lipoprotein receptor (LDLR) related protein 1B (LR1B) A domain
CSSREYICASDGCISASLKCNGEYDCADGSDEMDC

SEQ ID NO: 173 - protein, 36 aa, Artificial Sequence
  human low-density lipoprotein receptor (LDLR) related protein 1B (LR1B) A domain
CKEDQFRCKNKAHCIPIRWLCDGIHDCVDGSDEENC

SEQ ID NO: 174 - protein, 37 aa, Artificial Sequence
  human low-density lipoprotein receptor (LDLR) related protein 1B (LR1B) A domain
CRADEFLCNNSLCKLHFWVCDGEDDCGDNSDEAPDMC

SEQ ID NO: 175 - protein, 37 aa, Artificial Sequence
  human low-density lipoprotein receptor (LDLR) related protein 1B (LR1B) A domain
CPSTRPHRCRNNRICLQSEQMCNGIDECGDNSDEDHC

SEQ ID NO: 176 - protein, 35 aa, Artificial Sequence
  human low-density lipoprotein receptor (LDLR) related protein 1B (LR1B) A domain
CKKDEFACSNKKCIPMDLQCDRLDDCGDGSDEQGC

SEQ ID NO: 177 - protein, 37 aa, Artificial Sequence
  O75851 A domain
CAEGEALCQENGHCVPHGWLCDNQDDCGDGSDEEGEC

SEQ ID NO: 178 - protein, 37 aa, Artificial Sequence
  O75851 A domain
CGEGQMTCSSGHCLPLALLCDRQDDCGDGTDEPSYPC

SEQ ID NO: 179 - protein, 35 aa, Artificial Sequence
  O75851 A domain
CPQGLLACADGRCLPPALLCDGHPDCLDAADEESC

SEQ ID NO: 180 - protein, 37 aa, Artificial Sequence
  O75851 A domain
CVPGEVSCVDGTCLGAIQLCDGVWDCPDGADEGPGHC

SEQ ID NO: 181 - protein, 35 aa, Artificial Sequence
  ENSP00000262089 = O75851 A domain
CGPFEFRCGSGECTPRGWRCDQEEDCADGSDERGC

SEQ ID NO: 182 - protein, 38 aa, Artificial Sequence
  ENSP00000262089 A domain
CAPHHAPCARGPHCVSPEQLCDGVRQCPDGSDEGPDAC

SEQ ID NO: 183 - protein, 36 aa, Artificial Sequence
  O75851 A domain
CPGLFPCGVAPGLCLTPEQLCDGIPDCPQGEDELDC

SEQ ID NO: 184 - protein, 39 aa, Artificial Sequence
  O75851 A domain
CPEYTCPNGTCIGFQLVCDGQPDCGRPGQVGPSPEEQGC

SEQ ID NO: 185 - protein, 36 aa, Artificial Sequence
  O75851 A domain
CEPGVGLRCASGECVLRGGPCDGVLDCEDGSDEEGC

SEQ ID NO: 186 - protein, 35 aa, Artificial Sequence
  ENSP00000262089 A domain
CGPGQTPCEVLGCVEQAQVCDGREDCLDGSDERHC

SEQ ID NO: 187 - protein, 35 aa, Artificial Sequence
  O75851 A domain
CSPSQLSCGSGECLSAERRCDLRPDCQDGSDEDGC

SEQ ID NO: 188 - protein, 33 aa, Artificial Sequence
  C18oRF1 A domain
CKFTCTSGKCLYLGSLVCNQQNDCGDNSDEENC

SEQ ID NO: 189 - protein, 36 aa, Artificial Sequence
  AAH07083/Q9NPF0 A domain
CPPTKFQCRTSGLCVPLTWRCDRDLDCSDGSDEEEC

SEQ ID NO: 190 - protein, 36 aa, Artificial Sequence
  AAH07083/Q9NPF0 A domain
CLAGELRCTLSDDCIPLTWRCDGHPDCPDSSDELGC

SEQ ID NO: 191 - protein, 36 aa, Artificial Sequence
  Q9HBX9 A domain
CSLGYFPCGNITKCLPQLLHCNGVDDCGNQADEDNC

SEQ ID NO: 192 - protein, 35 aa, Artificial Sequence
  Q9BY79/Q96DQ9 A domain
CAHDEFRCDQLICLLPDSVCDGFANCADGSDETNC

SEQ ID NO: 193 - protein, 34 aa, Artificial Sequence
  Q9BY79/Q96DQ9 A domain
CGPSELSCQAGGCKGVQWMCDMWRDCTDGSDDNC

SEQ ID NO: 194 - protein, 35 aa, Artificial Sequence
  BAB55257 = ENSP00000239367 A domain
CSRYHFFCDDGCCIDITLACDGVQQCPDGSDEDFC

SEQ ID NO: 195 - protein, 32 aa, Artificial Sequence
  O95518 = ENSP00000255793 A domain
CPGEFLCSVNGLCVPACDGVKDCPNGLDERNC

SEQ ID NO: 196 - protein, 35 aa, Artificial Sequence
  ENSP00000255793 A domain
CRATFQCKEDSTCISLPKVCDGQPDCLNGSDEEQC

SEQ ID NO: 197 - protein, 36 aa, Artificial Sequence
  ENSP00000255793 A domain
CGTFTFQCEDRSCVKKPNPQCDGRPDCRDGSDEEHC

SEQ ID NO: 198 - protein, 36 aa, Artificial Sequence
  Q8WXD0 A domain
CQKGYFPCGNLTKCLPRAFHCDGKDDCGNGADEENC

SEQ ID NO: 199 - protein, 35 aa, Artificial Sequence
  Q8NBJ0 A domain
CSTARYHCKNGLCIDKSFICDGQNNCQDNSDEESC

SEQ ID NO: 200 - protein, 36 aa, Artificial Sequence
  Q8NBJ0 A domain
CGPTFFPCASGIHCIIGRFRCNGFEDCPDGSDEENC

SEQ ID NO: 201 - protein, 36 aa, Artificial Sequence
  Q8NBJ0 A domain
CNIPGNFMCSNGRCIPGAWQCDGLPDCFDKSDEKEC

SEQ ID NO: 202 - protein, 38 aa, Artificial Sequence
  MEGF7 A domain
CALDQFLCWNGRCIGQRKLCNGVNDCGDNSDESPQQNC

SEQ ID NO: 203 - protein, 34 aa, Artificial Sequence
  MEGF7 A domain
CEEDEFPCQNGYCIRSLWHCDGDNDCGDNSDEQC

SEQ ID NO: 204 - protein, 35 aa, Artificial Sequence
  MEGF7 A domain
CRSGEFMCDSGLCINAGWRCDGDADCDDQSDERNC

SEQ ID NO: 205 - protein, 35 aa, Artificial Sequence
  MEGF7 A domain
CTAEQFRCHSGRCVRLSWRCDGEDDCADNSDEENC

SEQ ID NO: 206 - protein, 35 aa, Artificial Sequence
  MEGF7 A domain
CSPLDFHCDNGKCIRRSWVCDGDNDCEDDSDEQDC

SEQ ID NO: 207 - protein, 35 aa, Artificial Sequence
  MEGF7 A domain
CNLEEFQCAYGRCILDIYHCDGDDDCGDWSDESDC

SEQ ID NO: 208 - protein, 35 aa, Artificial Sequence
  MEGF7 A domain
CSDKEFRCSDGSCIAEHWYCDGDTDCKDGSDEENC

SEQ ID NO: 209 - protein, 40 aa, Artificial Sequence
  MEGF7 A domain
CGRSHFTCAVSALGECTCIPAQWQCDGDNDCGDHSDEDGC

SEQ ID NO: 210 - protein, 35 aa, Artificial Sequence
  CAD61944 A domain
CLQEEFQCLNHRCVSAVQRCDGVDACGDGSDEAGC

SEQ ID NO: 211 - protein, 41 aa, Artificial Sequence
  CAD61944 A domain
CPPGHFPCGAAGTSGATACYLPADRCNYQTFCADGADERRC

SEQ ID NO: 212 - protein, 35 aa, Artificial Sequence
  CAD61944 A domain
CQPGNFRCRDEKCVYETWVCDGQPDCADGSDEWDC

SEQ ID NO: 213 - protein, 36 aa, Artificial Sequence
  ENSG00000181006 A domain
CPEITDFLCRDKKCIASHLLCDYKPDCSDRSDEAHC

SEQ ID NO: 214 - protein, 36 aa, Artificial Sequence
  ENSG00000320248 A domain
CNNRTFKCGNDICFRKQNAKCDGTVDCPDGSDEEGC

SEQ ID NO: 215 - protein, 37 aa, Artificial Sequence
  ENSG00000277547 A domain
CPPGHHHCQNKVCVEPQQLCDGEDNCGDLSDENPLTC

SEQ ID NO: 216 - protein, 34 aa, Artificial Sequence
  ENSG00000320022 A domain
CKQGHLACGDLCVPPEQLCDFEEQCAGGEDEQAC

SEQ ID NO: 217 - protein, 36 aa, Artificial Sequence
  ENSG00000313222 A domain
CPGNSFSCGNSQCVTKVNPECDDQEDCSDGSDEAHC

SEQ ID NO: 218 - protein, 4 aa, Artificial Sequence
  beta-Propeller domain repeated sequence
YWTD

SEQ ID NO: 219 - protein, 64 aa, Artificial Sequence
  LDL receptor class A domain monomer sequence
  MOD_RES (2)...(16): Xaa = any amino acid, Xaa at positions 5-16 may be present or absent
  MOD_RES (18)...(32): Xaa = any amino acid, Xaa at positions 21-32 may be present or absent
  MOD_RES (34)...(40): Xaa = any amino acid, Xaa at position 40 may be present or absent
  MOD_RES (43)...(46): Xaa = any amino acid
  MOD_RES (48)...(53): Xaa = any amino acid, Xaa at positions 52-53 may be present or absent
  MOD_RES (56)...(63): Xaa = any amino acid, Xaa at positions 58-63 may be present or absent
  DISULFID (1)...(33)
  DISULFID (17)...(47)
  DISULFID (41)...(64)
CXXXXXXXXXXXXXXXCXXXXXXXXXXXXXXXCXXXXXXXCBXXXXCXXXXXXDEXXXXXXXXC

SEQ ID NO: 220 - protein, 35 aa, Artificial Sequence
  LDL receptor class A domain monomer sequence
  MOD_RES (2)...(2): Xaa = Ala, Asp, Glu, Phe, Gly, His, Lys, Leu, Met, Asn, Pro, Gln, Arg, Ser, Thr or Val
  MOD_RES (3)...(3): Xaa = Ala, Cys, Asp, Glu, Gly, His, Ile, Lys, Leu, Met, Asn, Pro, Gln, Arg, Ser, Thr, Val, Trp or Tyr
  MOD_RES (4)...(4): Xaa = Ala, Asp, Glu, Phe, Gly, His, Lys, Leu, Met, Asn, Gln, Arg, Ser, Thr or Tyr
  MOD_RES (5)...(5): Xaa = Ala, Phe, His, Ile, Lys, Leu, Met, Gln, Arg, Ser, Thr, Val, Trp or Tyr
  MOD_RES (6)...(6): Xaa = Ala, Glu, Phe, His, Ile, Lys, Leu, Met, Asn, Pro, Gln, Arg, Ser, Thr or Val
  MOD_RES (9)...(9): Xaa = Ala, Asp, Glu, Phe, Gly, His, Lys, Leu, Asn, Pro, Gln, Arg, Ser, Thr, Val or Tyr
  MOD_RES (10)...(10): Xaa = Ala, Asp, Gly, His, Asn, Gln, Arg, Ser, Thr, Val or Tyr
  MOD_RES (11)...(11): Xaa = Asp, Glu, Gly, His, Lys, Leu, Asn, Gln, Arg, Ser or Thr
  MOD_RES (12)...(12): Xaa = Ala, Cys, Asp, Glu, Phe, Gly, His, Ile, Lys, Leu, Met, Asn, Gln, Arg, Ser, Thr or Val
  MOD_RES (14)...(14): Xaa = Ala, Phe, Ile, Lys, Leu, Thr, Val or Tyr
  MOD_RES (15)...(15): Xaa = Ala, Asp, Glu, Phe, Gly, His, Lys, Leu, Met, Asn, Pro, Gln, Arg, Ser, Thr, Val, Trp or Tyr
  MOD_RES (16)...(16): Xaa = Ala, Asp, Glu, Phe, Gly, His, Ile, Lys, Leu, Met, Asn, Pro, Gln, Arg, Ser, Thr, Val, Trp or Tyr
  MOD_RES (17)...(17): Xaa = Ala, Asp, Glu, Phe, Gly, His, Ile, Lys, Leu, Met, Asn, Pro, Gln, Arg, Ser, Thr, Val, Trp or Tyr
  MOD_RES (18)...(18): Xaa = Ala, Asp, Glu, Phe, Gly, Lys, Met, Asn, Gln, Arg, Ser, Thr, Val, Trp or Tyr
  MOD_RES (19)...(19): Xaa = Ala, Glu, Phe, His, Ile, Lys, Leu, Met, Pro, Gln, Arg, Thr, Val, Trp or Tyr
  MOD_RES (22)...(22): Xaa = Ala, Asp, Glu, Phe, Gly, His, Lys, Met, Asn, Gln, Arg, Ser, Thr, Val, Trp or Tyr
  MOD_RES (23)...(23): Xaa = Ala, Asp, Glu, Phe, Gly, His, Ile, Lys, Leu, Met, Asn, Gln, Arg, Ser, Thr, Val, Trp or Tyr
  MOD_RES (24)...(24): Xaa = Ala, Asp, Glu, Phe, His, Ile, Lys, Leu, Asn, Pro, Gln, Arg, Ser, Thr, Val, Trp or Tyr
  MOD_RES (24)...(24): Xaa = Ala, Asp, Glu, Phe, His, Ile, Lys, Leu, Asn, Pro, Gln, Arg, Ser, Thr, Val, Trp or Tyr
  MOD_RES (25)...(25): Xaa = Asp, Glu, His, Asn, Gln, Ser or Thr
  MOD_RES (27)...(27): Xaa = Ala, Asp, Glu, Gly, His, Ile, Lys, Leu, Met, Pro, Gln, Arg, Ser, Thr or Val
  MOD_RES (28)...(28): Xaa = Asp, Gly, His, Asn, Gln, Ser, Thr or Tyr
  MOD_RES (29)...(29): Xaa = Ala, Asp, Glu, Phe, Gly, His, Lys, Leu, Met, Asn, Gln, Arg, Ser, Trp or Tyr
  MOD_RES (30)...(30): Xaa = Ala, Glu, Gly, Leu, Met, Arg, Ser or Thr
  MOD_RES (33)...(33): Xaa = Ala, Asp, Glu, Phe, Gly, His, Ile, Lys, Leu, Met, Asn, Gln, Arg, Ser, Thr, Val, Trp or Tyr
  MOD_RES (34)...(34): Xaa = Ala, Asp, Glu, Phe, Gly, His, Ile, Lys, Leu, Met, Asn, Pro, Gln, Arg or Ser
CXXXXXXCXXXXCXXXXXXCBXXXXCXXXXDEXXC

SEQ ID NO: 221 - protein, 36 aa, Artificial Sequence
  LDL receptor class A domain monomer sequence
  MOD_RES (2)...(2): Xaa = Ala, Asp, Glu, Phe, Gly, His, Lys, Leu, Met, Asn, Pro, Gln, Arg, Ser, Thr or Val
  MOD_RES (3)...(3): Xaa = Ala, Cys, Asp, Glu, Gly, His, Ile, Lys, Leu, Met, Asn, Pro, Gln, Arg, Ser, Thr, Val, Trp or Tyr
  MOD_RES (4)...(4): Xaa = Ala, Asp, Glu, Phe, Gly, His, Lys, Asn, Pro, Gln, Arg, Ser, Thr, Val, Trp or Tyr
  MOD_RES (5)...(5): Xaa = Ala, Asp, Glu, Phe, Gly, His, Lys, Leu, Met, Asn, Gln, Arg, Ser, Thr or Tyr
  MOD_RES (6)...(6): Xaa = Ala, Phe, His, Ile, Lys, Leu, Met, Gln, Arg, Ser, Thr, Val, Trp or Tyr
  MOD_RES (7)...(7): Xaa = Ala, Glu, Phe, His, Ile, Lys, Leu, Met, Asn, Pro, Gln, Arg, Ser, Thr or Val
  MOD_RES (9)...(9): Xaa = Ala, Asp, Glu, Phe, Gly, His, Lys, Leu, Asn, Pro, Gln, Arg, Ser, Thr, Val or Tyr
  MOD_RES (10)...(10): Xaa = Ala, Asp, Gly, His, Asn, Gln, Arg, Ser, Thr, Val or Tyr
  MOD_RES (11)...(11): Xaa = Asp, Glu, Gly, His, Lys, Leu, Asn, Gln, Arg, Ser or Thr
  MOD_RES (12)...(12): Xaa = Ala, Cys, Asp, Glu, Phe, Gly, His, Ile, Lys, Leu, Met, Asn, Gln, Arg, Ser, Thr or Val
  MOD_RES (14)...(14): Xaa = Ala, Phe, Ile, Lys, Leu, Thr, Val or Tyr
  MOD_RES (15)...(15): Xaa = Ala, Asp, Glu, Phe, Gly, His, Lys, Leu, Met, Asn, Pro, Gln, Arg, Ser, Thr, Val, Trp or Tyr
  MOD_RES (16)...(16): Xaa = Ala, Asp, Glu, Phe, Gly, His, Ile, Lys, Leu, Met, Asn, Pro, Gln, Arg, Ser, Thr, Val, or Tyr
  MOD_RES (17)...(17): Xaa = Ala, Asp, Glu, Phe, Gly, His, Ile, Lys, Leu, Met, Asn, Pro, Gln, Arg, Ser, Thr, Val, Trp or Tyr
  MOD_RES (18)...(18): Xaa = Ala, Asp, Glu, Phe, Gly, Lys, Leu, Met, Asn, Gln, Arg, Ser, Thr, Val, Trp or Tyr
  MOD_RES (19)...(19): Xaa = Ala, Glu, Phe, His, Ile, Lys, Leu, Met, Pro, Gln, Arg, Thr, Val, Trp or Tyr
  MOD_RES (22)...(22): Xaa = Ala, Asp, Glu, Phe, Gly, His, Lys, Leu, Met, Asn, Gln, Arg, Ser, Thr, Val, Trp or Tyr
  MOD_RES (23)...(23): Xaa = Ala, Asp, Glu, Phe, Gly, His, Ile, Lys, Leu, Met, Asn, Gln, Arg, Ser, Thr, Val, Trp or Tyr
  MOD_RES (24)...(24): Xaa = Ala, Asp, Glu, Phe, His, Ile, Lys, Leu, Asn, Pro, Gln, Arg, Ser, Thr, Val, Trp or Tyr
  MOD_RES (25)...(25): Xaa = Asp, Glu, His, Asn, Gln, Ser or Thr
  MOD_RES (27)...(27): Xaa = Ala, Asp, Phe, Gly, Leu, Met, Pro, Ser, Thr or Val
  MOD_RES (29)...(29): Xaa = Ala, Gly, His, Gln or Arg
  MOD_RES (30)...(30): Xaa = Ser, Thr or Tyr
  MOD_RES (33)...(33): Xaa = Ala, Glu, Gly, His, Leu, Met, Asn, Pro, Arg or Ser
  MOD_RES (34)...(34): Xaa = Ala, Asp, Glu, Gly, Asn, Pro, Gln, Val or Tyr
  MOD_RES (35)...(35): Xaa = Ala, Asp, Glu, His, Leu, Asn, Gln or Ser
CXXXXXXCXXXXCXXXXXXCBXXXXCXXBXDEXXXC

SEQ ID NO: 222 - protein, 37 aa, Artificial Sequence
  LDL receptor class A domain monomer sequence
  MOD_RES (2)...(2): Xaa = Ala, Asp, Glu, Phe, Gly, His, Lys, Leu, Met, Asn, Pro, Gln, Arg, Ser, Thr or Val
  MOD_RES (3)...(3): Xaa = Ala, Cys, Asp, Glu, Gly, His, Ile, Lys, Leu, Met, Asn, Pro, Gln, Arg, Ser, Thr, Val, Trp or Tyr
  MOD_RES (4)...(4): Xaa = Ala, Asp, Glu, Phe, Gly, His, Lys, Asn, Pro, Gln, Arg, Ser, Thr, Val, Trp or Tyr
  MOD_RES (5)...(5): Xaa = Ala, Asp, Glu, Phe, Gly, His, Lys, Leu, Met, Asn, Gln, Arg, Ser, Thr or Tyr
  MOD_RES (6)...(6): Xaa = Ala, Phe, His, Ile, Lys, Leu, Met, Gln, Arg, Ser, Thr, Val, Trp or Tyr
  MOD_RES (7)...(7): Xaa = Ala, Glu, Phe, His, Ile, Lys, Leu, Met, Asn, Pro, Gln, Arg, Ser, Thr or Val
  MOD_RES (9)...(9): Xaa = Ala, Asp, Glu, Phe, Gly, His, Lys, Leu, Asn, Pro, Gln, Arg, Ser, Thr, Val or Tyr
  MOD_RES (10)...(10): Xaa = Ala, Asp, Gly, His, Asn, Gln, Arg, Ser, Thr, Val or Tyr
  MOD_RES (11)...(11): Xaa = Asp, Glu, Gly, His, Lys, Leu, Asn, Gln, Arg, Ser or Thr
  MOD_RES (12)...(12): Xaa = Ala, Cys, Asp, Glu, Phe, Gly, His, Ile, Lys, Leu, Met, Asn, Gln, Arg, Ser, Thr or Val
  MOD_RES (14)...(14): Xaa = Ala, Phe, Ile, Lys, Leu, Thr, Val or Tyr
  MOD_RES (15)...(15): Xaa = Ala, Asp, Glu, Phe, Gly, His, Lys, Leu, Met, Asn, Pro, Gln, Arg, Ser, Thr, Val, Trp or Tyr
  MOD_RES (16)...(16): Xaa = Ala, Asp, Glu, Phe, Gly, His, Ile, Lys, Leu, Met, Asn, Pro, Gln, Arg, Ser, Thr, Val, or Tyr
  MOD_RES (17)...(17): Xaa = Ala, Asp, Glu, Phe, Gly, His, Ile, Lys, Leu, Met, Asn, Pro, Gln, Arg, Ser, Thr, Val, Trp or Tyr
  MOD_RES (18)...(18): Xaa = Ala, Asp, Glu, Phe, Gly, Lys, Leu, Met, Asn, Gln, Arg, Ser, Thr, Val, Trp or Tyr
  MOD_RES (19)...(19): Xaa = Ala, Glu, Phe, His, Ile, Lys, Leu, Met, Pro, Gln, Arg, Thr, Val, Trp or Tyr
  MOD_RES (22)...(22): Xaa = Ala, Asp, Glu, Phe, Gly, His, Lys, Leu, Met, Asn, Gln, Arg, Ser, Thr, Val, Trp or Tyr
  MOD_RES (23)...(23): Xaa = Ala, Asp, Glu, Phe, Gly, His, Ile, Lys, Leu, Met, Asn, Gln, Arg, Ser, Thr, Val, Trp or Tyr
  MOD_RES (24)...(24): Xaa = Ala, Asp, Glu, Phe, His, Ile, Lys, Leu, Asn, Pro, Gln, Arg, Ser, Thr, Val, Trp or Tyr
  MOD_RES (25)...(25): Xaa = Asp, Glu, His, Asn, Gln, Ser or Thr
  MOD_RES (27)...(27): Xaa = Glu, Gly, Lys, Leu, Pro, Gln, Arg or Ser
  MOD_RES (28)...(28): Xaa = Asp, Asn or Ser
  MOD_RES (29)...(29): Xaa = Asp, Phe, Gly, His, Lys, Asn, Gln, Arg, Ser, Trp or Tyr
  MOD_RES (30)...(30): Xaa = Ala, Glu, Leu, Ser or Thr
  MOD_RES (33)...(33): Xaa = Ala, Asp, Glu, Gly, Lys, Leu, Met, Asn, Pro, Ser, Thr or Trp
  MOD_RES (34)...(34): Xaa = Ala, Asp, Glu, His, Ile, Lys, Leu, Met, Asn, Pro, Gln, Arg or Ser
  MOD_RES (35)...(35): Xaa = Ala, Asp, Glu, Gly, His, Ile, Lys, Leu, Gln, Ser, Thr, Val or Tyr
  MOD_RES (36)...(36): Xaa = Ala, Glu, His, Ile, Leu, Met, Asn, Pro, Gln, Arg, Thr, Val or Tyr
CXXXXXXCXXXXCXXXXXXCBXXXXCXXXXDEXXXXC

SEQ ID NO: 223 - protein, 36 aa, Artificial Sequence
  LDL receptor class A domain monomer sequence
  MOD_RES (2)...(2): Xaa = Ala, Asp, Glu, Phe, Gly, His, Lys, Leu, Asn, Pro, Arg, Ser or Thr
  MOD_RES (3)...(3): Xaa = Ala, Asp, Glu, Gly, His, Leu, Asn, Pro, Arg, Ser or Thr
  MOD_RES (4)...(4): Xaa = Asp, Phe, Gly, Lys, Leu, Asn, Pro, Gln, Arg, Ser, Thr, Val or Tyr
  MOD_RES (5)...(5): Xaa = Asp, Glu, Phe, Gly, His, Lys, Met, Asn, Arg, Ser, Thr or Val
  MOD_RES (6)...(6): Xaa = Asp, Glu, Gly, Lys, Leu, Asn, Pro, Gln or Arg
  MOD_RES (7)...(7): Xaa = Phe, His, Leu, Val or Trp
  MOD_RES (8)...(8): Xaa = Ala, Glu, Gly, Lys, Leu, Met, Arg, Ser, Thr or Val
  MOD_RES (10)...(10): Xaa = Ala, Asp, Glu, Phe, Gly, His, Lys, Leu, Asn, Pro, Gln, Arg, Ser, Thr, Val or Tyr
  MOD_RES (11)...(11): Xaa = Ala, Asp, Gly, His, Asn, Gln, Arg, Ser, Thr, Val or Tyr
  MOD_RES (12)...(12): Xaa = Asp, Glu, Gly, His, Lys, Leu, Asn, Gln, Arg, Ser or Thr
  MOD_RES (13)...(13): Xaa = Ala, Cys, Asp, Glu, Phe, Gly, His, Ile, Lys, Leu, Met, Asn, Gln, Arg, Ser, Thr or Val
  MOD_RES (15)...(15): Xaa = Ala, Phe, Ile, Lys, Leu, Thr, Val or Tyr
  MOD_RES (16)...(16): Xaa = Ala, Asp, Glu, Phe, Gly, His, Lys, Leu, Met, Asn, Pro, Gln, Arg, Ser, Thr, Val, Trp or Tyr
  MOD_RES (17)...(17): Xaa = Ala, Asp, Glu, Phe, Gly, His, Ile, Lys, Leu, Met, Asn, Pro, Gln, Arg, Ser, Thr, Val, or Tyr
  MOD_RES (18)...(18): Xaa = Ala, Asp, Glu, Phe, Gly, His, Ile, Lys, Leu, Met, Asn, Pro, Gln, Arg, Ser, Thr, Val, Trp or Tyr
  MOD_RES (19)...(19): Xaa = Ala, Asp, Glu, Phe, Gly, Lys, Leu, Met, Asn, Gln, Arg, Ser, Thr, Val, Trp or Tyr
  MOD_RES (20)...(20): Xaa = Ala, Glu, Phe, His, Ile, Lys, Leu, Met, Pro, Gln, Arg, Thr, Val, Trp or Tyr
  MOD_RES (23)...(23): Xaa = Ala, Asp, Glu, Phe, Gly, His, Lys, Leu, Met, Asn, Gln, Arg, Ser, Thr, Val, Trp or Tyr
  MOD_RES (24)...(24): Xaa = Ala, Asp, Glu, Phe, Gly, His, Ile, Lys, Leu, Met, Asn, Gln, Arg, Ser, Thr, Val, Trp or Tyr
  MOD_RES (25)...(25): Xaa = Ala, Asp, Glu, Phe, His, Ile, Lys, Leu, Asn, Pro, Gln, Arg, Ser, Thr, Val, Trp or Tyr
  MOD_RES (26)...(26): Xaa = Asp, Glu, His, Asn, Gln, Ser or Thr
  MOD_RES (28)...(28): Xaa = Ala, Asp, Glu, Gly, His, Ile, Lys, Leu, Met, Pro, Gln, Arg, Ser, Thr or Val
  MOD_RES (29)...(29): Xaa = Asp, Gly, His, Asn, Gln, Ser, Thr or Tyr
  MOD_RES (30)...(30): Xaa = Ala, Asp, Glu, Phe, Gly, His, Lys, Leu, Met, Asn, Gln, Arg, Ser, Trp or Tyr
  MOD_RES (31)...(31): Xaa = Ala, Glu, Gly, Leu, Met, Arg, Ser or Thr
  MOD_RES (34)...(34): Xaa = Ala, Asp, Glu, Phe, Gly, His, Ile, Lys, Leu, Met, Asn, Gln, Arg, Ser, Thr, Val, Trp or Tyr
  MOD_RES (35)...(35): Xaa = Ala, Asp, Glu, Phe, Gly, His, Ile, Lys, Leu, Met, Asn, Pro, Gln, Arg or Ser
CXXXXXXXCXXXXCXXXXXXCBXXXXCXXXXDEXXC

SEQ ID NO: 224 - protein, 37 aa, Artificial Sequence
  LDL receptor class A domain monomer sequence
  MOD_RES (2)...(2): Xaa = Ala, Asp, Glu, Phe, Gly, His, Lys, Leu, Asn, Pro, Arg, Ser or Thr
  MOD_RES (3)...(3): Xaa = Ala, Asp, Glu, Gly, His, Leu, Asn, Pro, Arg, Ser or Thr
  MOD_RES (4)...(4): Xaa = Asp, Phe, Gly, Lys, Leu, Asn, Pro, Gln, Arg, Ser, Thr, Val or Tyr
  MOD_RES (5)...(5): Xaa = Asp, Glu, Phe, Gly, His, Lys, Met, Asn, Arg, Ser, Thr or Val
  MOD_RES (6)...(6): Xaa = Asp, Glu, Gly, Lys, Leu, Asn, Pro, Gln or Arg
  MOD_RES (7)...(7): Xaa = Phe, His, Leu, Val or Trp
  MOD_RES (8)...(8): Xaa = Ala, Glu, Gly, Lys, Leu, Met, Arg, Ser, Thr or Val
  MOD_RES (10)...(10): Xaa = Ala, Asp, Glu, Phe, Gly, His, Lys, Leu, Asn, Pro, Gln, Arg, Ser, Thr, Val or Tyr
  MOD_RES (11)...(11): Xaa = Ala, Asp, Gly, His, Asn, Gln, Arg, Ser, Thr, Val or Tyr
  MOD_RES (12)...(12): Xaa = Asp, Glu, Gly, His, Lys, Leu, Asn, Gln, Arg, Ser or Thr
  MOD_RES (13)...(13): Xaa = Ala, Cys, Asp, Glu, Phe, Gly, His, Ile, Lys, Leu, Met, Asn, Gln, Arg, Ser, Thr or Val
  MOD_RES (15)...(15): Xaa = Ala, Phe, Ile, Lys, Leu, Thr, Val or Tyr
  MOD_RES (16)...(16): Xaa = Ala, Asp, Glu, Phe, Gly, His, Lys, Leu, Met, Asn, Pro, Gln, Arg, Ser, Thr, Val, Trp or Tyr
  MOD_RES (17)...(17): Xaa = Ala, Asp, Glu, Phe, Gly, His, Ile, Lys, Leu, Met, Asn, Pro, Gln, Arg, Ser, Thr, Val, or Tyr
  MOD_RES (18)...(18): Xaa = Ala, Asp, Glu, Phe, Gly, His, Ile, Lys, Leu, Met, Asn, Pro, Gln, Arg, Ser, Thr, Val, Trp or Tyr
  MOD_RES (19)...(19): Xaa = Ala, Asp, Glu, Phe, Gly, Lys, Leu, Met, Asn, Gln, Arg, Ser, Thr, Val, Trp or Tyr
  MOD_RES (20)...(20): Xaa = Ala, Glu, Phe, His, Ile, Lys, Leu, Met, Pro, Gln, Arg, Thr, Val, Trp or Tyr
  MOD_RES (23)...(23): Xaa = Ala, Asp, Glu, Phe, Gly, His, Lys, Leu, Met, Asn, Gln, Arg, Ser, Thr, Val, Trp or Tyr
  MOD_RES (24)...(24): Xaa = Ala, Asp, Glu, Phe, Gly, His, Ile, Lys, Leu, Met, Asn, Gln, Arg, Ser, Thr, Val, Trp or Tyr
  MOD_RES (25)...(25): Xaa = Ala, Asp, Glu, Phe, His, Ile, Lys, Leu, Asn, Pro, Gln, Arg, Ser, Thr, Val, Trp or Tyr
  MOD_RES (26)...(26): Xaa = Asp, Glu, His, Asn, Gln, Ser or Thr
  MOD_RES (28)...(28): Xaa = Ala, Asp, Phe, Gly, Leu, Met, Pro, Ser, Thr or Val
  MOD_RES (30)...(30): Xaa = Ala, Gly, His, Gln or Arg
  MOD_RES (31)...(31): Xaa = Ser, Thr or Tyr
  MOD_RES (34)...(34): Xaa = Ala, Glu, Gly, His, Leu, Met, Asn, Pro, Arg or Ser
  MOD_RES (35)...(35): Xaa = Ala, Asp, Glu, Gly, Asn, Pro, Gln, Val or Tyr
  MOD_RES (36)...(36): Xaa = Ala, Asp, Glu, His, Leu, Asn, Gln or Ser
CXXXXXXXCXXXXCXXXXXXCBXXXXCXBXXDEXXXC

SEQ ID NO: 225 - protein, 37 aa, Artificial Sequence
  LDL receptor class A domain monomer sequence
  MOD_RES (2)...(2): Xaa = Ala, Asp, Glu, Phe, Gly, His, Lys, Leu, Asn, Pro, Arg, Ser or Thr
  MOD_RES (3)...(3): Xaa = Ala, Asp, Glu, Gly, His, Leu, Asn, Pro, Arg, Ser or Thr
  MOD_RES (4)...(4): Xaa = Asp, Phe, Gly, Lys, Leu, Asn, Pro, Gln, Arg, Ser, Thr, Val or Tyr
  MOD_RES (5)...(5): Xaa = Asp, Glu, Phe, Gly, His, Lys, Met, Asn, Arg, Ser, Thr or Val
  MOD_RES (6)...(6): Xaa = Asp, Glu, Gly, Lys, Leu, Asn, Pro, Gln or Arg
  MOD_RES (7)...(7): Xaa = Phe, His, Leu, Val or Trp
  MOD_RES (8)...(8): Xaa = Ala, Glu, Gly, Lys, Leu, Met, Arg, Ser, Thr or Val
  MOD_RES (10)...(10): Xaa = Ala, Asp, Glu, Phe, Gly, His, Lys, Leu, Asn, Pro, Gln, Arg, Ser, Thr, Val or Tyr
  MOD_RES (11)...(11): Xaa = Ala, Asp, Gly, His, Asn, Gln, Arg, Ser, Thr, Val or Tyr
  MOD_RES (12)...(12): Xaa = Asp, Glu, Gly, His, Lys, Leu, Asn, Gln, Arg, Ser or Thr
  MOD_RES (13)...(13): Xaa = Ala, Cys, Asp, Glu, Phe, Gly, His, Ile, Lys, Leu, Met, Asn, Gln, Arg, Ser, Thr or Val
  MOD_RES (15)...(15): Xaa = Ala, Phe, Ile, Lys, Leu, Thr, Val or Tyr
  MOD_RES (16)...(16): Xaa = Ala, Asp, Glu, Phe, Gly, His, Lys, Leu, Met, Asn, Pro, Gln, Arg, Ser, Thr, Val, Trp or Tyr
  MOD_RES (17)...(17): Xaa = Ala, Asp, Glu, Phe, Gly, His, Ile, Lys, Leu, Met, Asn, Pro, Gln, Arg, Ser, Thr, Val, or Tyr
  MOD_RES (18)...(18): Xaa = Ala, Asp, Glu, Phe, Gly, His, Ile, Lys, Leu, Met, Asn, Pro, Gln, Arg, Ser, Thr, Val, Trp or Tyr
  MOD_RES (19)...(19): Xaa = Ala, Asp, Glu, Phe, Gly, Lys, Leu, Met, Asn, Gln, Arg, Ser, Thr, Val, Trp or Tyr
  MOD_RES (20)...(20): Xaa = Ala, Glu, Phe, His, Ile, Lys, Leu, Met, Pro, Gln, Arg, Thr, Val, Trp or Tyr
  MOD_RES (23)...(23): Xaa = Ala, Asp, Glu, Phe, Gly, His, Lys, Leu, Met, Asn, Gln, Arg, Ser, Thr, Val, Trp or Tyr
  MOD_RES (24)...(24): Xaa = Ala, Asp, Glu, Phe, Gly, His, Ile, Lys, Leu, Met, Asn, Gln, Arg, Ser, Thr, Val, Trp or Tyr
  MOD_RES (25)...(25): Xaa = Ala, Asp, Glu, Phe, His, Ile, Lys, Leu, Asn, Pro, Gln, Arg, Ser, Thr, Val, Trp or Tyr
  MOD_RES (26)...(26): Xaa = Asp, Glu, His, Asn, Gln, Ser or Thr
  MOD_RES (28)...(28): Xaa = Glu, Gly, Lys, Leu, Pro, Gln, Arg or Ser
  MOD_RES (29)...(29): Xaa = Asp, Asn or Ser
  MOD_RES (30)...(30): Xaa = Asp, Phe, Gly, His, Lys, Asn, Gln, Arg, Ser, Trp or Tyr
  MOD_RES (31)...(31): Xaa = Ala, Glu, Leu, Ser or Thr
  MOD_RES (34)...(34): Xaa = Ala, Asp, Glu, Gly, Lys, Leu, Met, Asn, Pro, Ser, Thr or Trp
  MOD_RES (35)...(35): Xaa = Ala, Asp, Glu, His, Ile, Lys, Leu, Met, Asn, Pro, Gln, Arg or Ser
  MOD_RES (36)...(36): Xaa = Ala, Asp, Glu, Gly, His, Ile, Lys, Leu, Gln, Ser, Thr, Val or Tyr
  MOD_RES (37)...(37): Xaa = Ala, Glu, His, Ile, Leu, Met, Asn, Pro, Gln, Arg, Thr, Val or Tyr
CXXXXXXXCXXXXCXXXXXXCBXXXXCXXXXDEXXXC

SEQ ID NO: 226 - protein, 36 aa, Artificial Sequence
  LDL receptor class A domain monomer sequence
  MOD_RES (2)...(2): Xaa = Ala, Asp, Glu, Phe, Gly, His, Lys, Leu, Met, Asn, Pro, Gln, Arg, Ser, Thr or Val
  MOD_RES (3)...(3): Xaa = Ala, Cys, Asp, Glu, Gly, His, Ile, Lys, Leu, Met, Asn, Pro, Gln, Arg, Ser, Thr, Val, Trp or Tyr
  MOD_RES (4)...(4): Xaa = Ala, Asp, Glu, Phe, Gly, His, Lys, Asn, Pro, Gln, Arg, Ser, Thr, Val, Trp or Tyr
  MOD_RES (5)...(5): Xaa = Ala, Asp, Glu, Phe, Gly, His, Lys, Leu, Met, Asn, Gln, Arg, Ser, Thr or Tyr
  MOD_RES (6)...(6): Xaa = Ala, Phe, His, Ile, Lys, Leu, Met, Gln, Arg, Ser, Thr, Val, Trp or Tyr
  MOD_RES (7)...(7): Xaa = Ala, Glu, Phe, His, Ile, Lys, Leu, Met, Asn, Pro, Gln, Arg, Ser, Thr or Val
  MOD_RES (9)...(9): Xaa = Ala, Asp, Glu, Gly, His, Lys, Leu, Asn, Pro, Gln, Arg, Ser, Thr, Val or Trp
  MOD_RES (10)...(10): Xaa = Asp, Glu, Gly, Ile, Lys, Leu, Asn, Pro, Gln, Arg, Ser, Thr or Val
  MOD_RES (11)...(11): Xaa = Ala, Asp, Glu, Gly, His, Ile, Lys, Asn, Pro, Gln, Arg, Ser, Thr or Tyr
  MOD_RES (12)...(12): Xaa = Ala, Asp, Glu, Phe, Gly, His, Ile, Lys, Leu, Asn, Pro, Gln, Arg, Ser, Thr, Val, Trp or Tyr
  MOD_RES (13)...(13): Xaa = Ala, Asp, Glu, Gly, His, Ile, Lys, Leu, Met, Asn, Gln, Arg, Thr or Val
  MOD_RES (15)...(15): Xaa = Ala, Phe, Ile, Lys, Leu, Thr, Val or Tyr
  MOD_RES (16)...(16): Xaa = Ala, Asp, Glu, Phe, Gly, His, Lys, Leu, Met, Asn, Pro, Gln, Arg, Ser, Thr, Val, Trp or Tyr
  MOD_RES (17)...(17): Xaa = Ala, Asp, Glu, Phe, Gly, His, Ile, Lys, Leu, Met, Asn, Pro, Gln, Arg, Ser, Thr, Val, or Tyr
  MOD_RES (18)...(18): Xaa = Ala, Asp, Glu, Phe, Gly, His, Ile, Lys, Leu, Met, Asn, Pro, Gln, Arg, Ser, Thr, Val, Trp or Tyr
  MOD_RES (19)...(19): Xaa = Ala, Asp, Glu, Phe, Gly, Lys, Leu, Met, Asn, Gln, Arg, Ser, Thr, Val, Trp or Tyr
  MOD_RES (20)...(20): Xaa = Ala, Glu, Phe, His, Ile, Lys, Leu, Met, Pro, Gln, Arg, Thr, Val, Trp or Tyr
  MOD_RES (23)...(23): Xaa = Ala, Asp, Glu, Phe, Gly, His, Lys, Leu, Met, Asn, Gln, Arg, Ser, Thr, Val, Trp or Tyr
  MOD_RES (24)...(24): Xaa = Ala, Asp, Glu, Phe, Gly, His, Ile, Lys, Leu, Met, Asn, Gln, Arg, Ser, Thr, Val, Trp or Tyr
  MOD_RES (25)...(25): Xaa = Ala, Asp, Glu, Phe, His, Ile, Lys, Leu, Asn, Pro, Gln, Arg, Ser, Thr, Val, Trp or Tyr
  MOD_RES (26)...(26): Xaa = Asp, Glu, His, Asn, Gln, Ser or Thr
  MOD_RES (28)...(28): Xaa = Ala, Asp, Glu, Gly, His, Ile, Lys, Leu, Met, Pro, Gln, Arg, Ser, Thr or Val
  MOD_RES (29)...(29): Xaa = Asp, Gly, His, Asn, Gln, Ser, Thr or Tyr
  MOD_RES (30)...(30): Xaa = Ala, Asp, Glu, Phe, Gly, His, Lys, Leu, Met, Asn, Gln, Arg, Ser, Trp or Tyr
  MOD_RES (31)...(31): Xaa = Ala, Glu, Gly, Leu, Met, Arg, Ser or Thr
  MOD_RES (34)...(34): Xaa = Ala, Asp, Glu, Phe, Gly, His, Ile, Lys, Leu, Met, Asn, Gln, Arg, Ser, Thr, Val, Trp or Tyr
  MOD_RES (35)...(35): Xaa = Ala, Asp, Glu, Phe, Gly, His, Ile, Lys, Leu, Met, Asn, Pro, Gln, Arg or Ser
CXXXXXXCXXXXXCXXXXXXCBXXXXCXXXXDEXXC

SEQ ID NO: 227 - protein, 37 aa, Artificial Sequence
  LDL receptor class A domain monomer sequence
  MOD_RES (2)...(2): Xaa = Ala, Asp, Glu, Phe, Gly, His, Lys, Leu, Met, Asn, Pro, Gln, Arg, Ser, Thr or Val
  MOD_RES (3)...(3): Xaa = Ala, Cys, Asp, Glu, Gly, His, Ile, Lys, Leu, Met, Asn, Pro, Gln, Arg, Ser, Thr, Val, Trp or Tyr
  MOD_RES (4)...(4): Xaa = Ala, Asp, Glu, Phe, Gly, His, Lys, Asn, Pro, Gln, Arg, Ser, Thr, Val, Trp or Tyr
  MOD_RES (5)...(5): Xaa = Ala, Asp, Glu, Phe, Gly, His, Lys, Leu, Met, Asn, Gln, Arg, Ser, Thr or Tyr
  MOD_RES (6)...(6): Xaa = Ala, Phe, His, Ile, Lys, Leu, Met, Gln, Arg, Ser, Thr, Val, Trp or Tyr
  MOD_RES (7)...(7): Xaa = Ala, Glu, Phe, His, Ile, Lys, Leu, Met, Asn, Pro, Gln, Arg, Ser, Thr or Val
  MOD_RES (9)...(9): Xaa = Ala, Asp, Glu, Gly, His, Lys, Leu, Asn, Pro, Gln, Arg, Ser, Thr, Val or Trp
  MOD_RES (10)...(10): Xaa = Asp, Glu, Gly, Ile, Lys, Leu, Asn, Pro, Gln, Arg, Ser, Thr or Val
  MOD_RES (11)...(11): Xaa = Ala, Asp, Glu, Gly, His, Ile, Lys, Asn, Pro, Gln, Arg, Ser, Thr or Tyr
  MOD_RES (12)...(12): Xaa = Ala, Asp, Glu, Phe, Gly, His, Ile, Lys, Leu, Asn, Pro, Gln, Arg, Ser, Thr, Val, Trp or Tyr
  MOD_RES (13)...(13): Xaa = Ala, Asp, Glu, Gly, His, Ile, Lys, Leu, Met, Asn, Gln, Arg, Thr or Val
  MOD_RES (15)...(15): Xaa = Ala, Phe, Ile, Lys, Leu, Thr, Val or Tyr
  MOD_RES (16)...(16): Xaa = Ala, Asp, Glu, Phe, Gly, His, Lys, Leu, Met, Asn, Pro, Gln, Arg, Ser, Thr, Val, Trp or Tyr
  MOD_RES (17)...(17): Xaa = Ala, Asp, Glu, Phe, Gly, His, Ile, Lys, Leu, Met, Asn, Pro, Gln, Arg, Ser, Thr, Val, or Tyr
  MOD_RES (18)...(18): Xaa = Ala, Asp, Glu, Phe, Gly, His, Ile, Lys, Leu, Met, Asn, Pro, Gln, Arg, Ser, Thr, Val, Trp or Tyr
  MOD_RES (19)...(19): Xaa = Ala, Asp, Glu, Phe, Gly, Lys, Leu, Met, Asn, Gln, Arg, Ser, Thr, Val, Trp or Tyr
  MOD_RES (20)...(20): Xaa = Ala, Glu, Phe, His, Ile, Lys, Leu, Met, Pro, Gln, Arg, Thr, Val, Trp or Tyr
  MOD_RES (23)...(23): Xaa = Ala, Asp, Glu, Phe, Gly, His, Lys, Leu, Met, Asn, Gln, Arg, Ser, Thr, Val, Trp or Tyr
  MOD_RES (24)...(24): Xaa = Ala, Asp, Glu, Phe, Gly, His, Ile, Lys, Leu, Met, Asn, Gln, Arg, Ser, Thr, Val, Trp or Tyr
  MOD_RES (25)...(25): Xaa = Ala, Asp, Glu, Phe, His, Ile, Lys, Leu, Asn, Pro, Gln, Arg, Ser, Thr, Val, Trp or Tyr
  MOD_RES (26)...(26): Xaa = Asp, Glu, His, Asn, Gln, Ser or Thr
  MOD_RES (28)...(28): Xaa = Ala, Asp, Phe, Gly, Leu, Met, Pro, Ser, Thr or Val
  MOD_RES (30)...(30): Xaa = Ala, Gly, His, Gln or Arg
  MOD_RES (31)...(31): Xaa = Ser, Thr or Tyr
  MOD_RES (34)...(34): Xaa = Ala, Glu, Gly, His, Leu, Met, Asn, Pro, Arg or Ser
  MOD_RES (35)...(35): Xaa = Ala, Asp, Glu, Gly, Asn, Pro, Gln, Val or Tyr
  MOD_RES (36)...(36): Xaa = Ala, Asp, Glu, His, Leu, Asn, Gln or Ser
CXXXXXXCXXXXXCXXXXXXCBXXXXCXBXXDEXXXC

SEQ ID NO: 228 - protein, 38 aa, Artificial Sequence
  LDL receptor class A domain monomer sequence
  MOD_RES (2)...(2): Xaa = Ala, Asp, Glu, Phe, Gly, His, Lys, Leu, Met, Asn, Pro, Gln, Arg, Ser, Thr or Val
  MOD_RES (3)...(3): Xaa = Ala, Cys, Asp, Glu, Gly, His, Ile, Lys, Leu, Met, Asn, Pro, Gln, Arg, Ser, Thr, Val, Trp or Tyr
  MOD_RES (4)...(4): Xaa = Ala, Asp, Glu, Phe, Gly, His, Lys, Asn, Pro, Gln, Arg, Ser, Thr, Val, Trp or Tyr
  MOD_RES (5)...(5): Xaa = Ala, Asp, Glu, Phe, Gly, His, Lys, Leu, Met, Asn, Gln, Arg, Ser, Thr or Tyr
  MOD_RES (6)...(6): Xaa = Ala, Phe, His, Ile, Lys, Leu, Met, Gln, Arg, Ser, Thr, Val, Trp or Tyr
  MOD_RES (7)...(7): Xaa = Ala, Glu, Phe, His, Ile, Lys, Leu, Met, Asn, Pro, Gln, Arg, Ser, Thr or Val
  MOD_RES (9)...(9): Xaa = Ala, Asp, Glu, Gly, His, Lys, Leu, Asn, Pro, Gln, Arg, Ser, Thr, Val or Trp
  MOD_RES (10)...(10): Xaa = Asp, Glu, Gly, Ile, Lys, Leu, Asn, Pro, Gln, Arg, Ser, Thr or Val
  MOD_RES (11)...(11): Xaa = Ala, Asp, Glu, Gly, His, Ile, Lys, Asn, Pro, Gln, Arg, Ser, Thr or Tyr
  MOD_RES (12)...(12): Xaa = Ala, Asp, Glu, Phe, Gly, His, Ile, Lys, Leu, Asn, Pro, Gln, Arg, Ser, Thr, Val, Trp or Tyr
  MOD_RES (13)...(13): Xaa = Ala, Asp, Glu, Gly, His, Ile, Lys, Leu, Met, Asn, Gln, Arg, Thr or Val
  MOD_RES (15)...(15): Xaa = Ala, Phe, Ile, Lys, Leu, Thr, Val or Tyr
  MOD_RES (16)...(16): Xaa = Ala, Asp, Glu, Phe, Gly, His, Lys, Leu, Met, Asn, Pro, Gln, Arg, Ser, Thr, Val, Trp or Tyr
  MOD_RES (17)...(17): Xaa = Ala, Asp, Glu, Phe, Gly, His, Ile, Lys, Leu, Met, Asn, Pro, Gln, Arg, Ser, Thr, Val, or Tyr
  MOD_RES (18)...(18): Xaa = Ala, Asp, Glu, Phe, Gly, His, Ile, Lys, Leu, Met, Asn, Pro, Gln, Arg, Ser, Thr, Val, Trp or Tyr
  MOD_RES (19)...(19): Xaa = Ala, Asp, Glu, Phe, Gly, Lys, Leu, Met, Asn, Gln, Arg, Ser, Thr, Val, Trp or Tyr
  MOD_RES (20)...(20): Xaa = Ala, Glu, Phe, His, Ile, Lys, Leu, Met, Pro, Gln, Arg, Thr, Val, Trp or Tyr
  MOD_RES (23)...(23): Xaa = Ala, Asp, Glu, Phe, Gly, His, Lys, Leu, Met, Asn, Gln, Arg, Ser, Thr, Val, Trp or Tyr
  MOD_RES (24)...(24): Xaa = Ala, Asp, Glu, Phe, Gly, His, Ile, Lys, Leu, Met, Asn, Gln, Arg, Ser, Thr, Val, Trp or Tyr
  MOD_RES (25)...(25): Xaa = Ala, Asp, Glu, Phe, His, Ile, Lys, Leu, Asn, Pro, Gln, Arg, Ser, Thr, Val, Trp or Tyr
  MOD_RES (26)...(26): Xaa = Asp, Glu, His, Asn, Gln, Ser or Thr
  MOD_RES (28)...(28): Xaa = Glu, Gly, Lys, Leu, Pro, Gln, Arg or Ser
  MOD_RES (29)...(29): Xaa = Asp, Asn or Ser
  MOD_RES (30)...(30): Xaa = Asp, Phe, Gly, His, Lys, Asn, Gln, Arg, Ser, Trp or Tyr
  MOD_RES (31)...(31): Xaa = Ala, Glu, Leu, Ser or Thr
  MOD_RES (34)...(34): Xaa = Ala, Asp, Glu, Gly, Lys, Leu, Met, Asn, Pro, Ser, Thr or Trp
  MOD_RES (35)...(35): Xaa = Ala, Asp, Glu, His, Ile, Lys, Leu, Met, Asn, Pro, Gln, Arg or Ser
  MOD_RES (36)...(36): Xaa = Ala, Asp, Glu, Gly, His, Ile, Lys, Leu, Gln, Ser, Thr, Val or Tyr
  MOD_RES (37)...(37): Xaa = Ala, Glu, His, Ile, Leu, Met, Asn, Pro, Gln, Arg, Thr, Val or Tyr
CXXXXXXCXXXXXCXXXXXXCBXXXXCXXXXDEXXXXC

SEQ ID NO: 229 - protein, 37 aa, Artificial Sequence
  LDL receptor class A domain monomer sequence
  MOD_RES (2)...(2): Xaa = Ala, Asp, Glu, Phe, Gly, His, Lys, Leu, Asn, Pro, Arg, Ser or Thr
  MOD_RES (3)...(3): Xaa = Ala, Asp, Glu, Gly, His, Leu, Asn, Pro, Arg, Ser or Thr
  MOD_RES (4)...(4): Xaa = Asp, Phe, Gly, Lys, Leu, Asn, Pro, Gln, Arg, Ser, Thr, Val or Tyr
  MOD_RES (5)...(5): Xaa = Asp, Glu, Phe, Gly, His, Lys, Met, Asn, Arg, Ser, Thr or Val
  MOD_RES (6)...(6): Xaa = Asp, Glu, Gly, Lys, Leu, Asn, Pro, Gln or Arg
  MOD_RES (7)...(7): Xaa = Phe, His, Leu, Val or Trp
  MOD_RES (8)...(8): Xaa = Ala, Glu, Gly, Lys, Leu, Met, Arg, Ser, Thr or Val
  MOD_RES (10)...(10): Xaa = Ala, Asp, Glu, Gly, His, Lys, Leu, Asn, Pro, Gln, Arg, Ser, Thr, Val or Trp
  MOD_RES (11)...(11): Xaa = Asp, Glu, Gly, Ile, Lys, Leu, Asn, Pro, Gln, Arg, Ser, Thr or Val
  MOD_RES (12)...(12): Xaa = Ala, Asp, Glu, Gly, His, Ile, Lys, Asn, Pro, Gln, Arg, Ser, Thr or Tyr
  MOD_RES (13)...(13): Xaa = Ala, Asp, Glu, Phe, Gly, His, Ile, Lys, Leu, Asn, Pro, Gln, Arg, Ser, Thr, Val, Trp or Tyr
  MOD_RES (14)...(14): Xaa = Ala, Asp, Glu, Gly, His, Ile, Lys, Leu, Met, Asn, Gln, Arg, Thr or Val
  MOD_RES (16)...(16): Xaa = Ala, Phe, Ile, Lys, Leu, Thr, Val or Tyr
  MOD_RES (17)...(17): Xaa = Ala, Asp, Glu, Phe, Gly, His, Lys, Leu, Met, Asn, Pro, Gln, Arg, Ser, Thr, Val, Trp or Tyr
  MOD_RES (18)...(18): Xaa = Ala, Asp, Glu, Phe, Gly, His, Ile, Lys, Leu, Met, Asn, Pro, Gln, Arg, Ser, Thr, Val, or Tyr
  MOD_RES (19)...(19): Xaa = Ala, Asp, Glu, Phe, Gly, His, Ile, Lys, Leu, Met, Asn, Pro, Gln, Arg, Ser, Thr, Val, Trp or Tyr
  MOD_RES (20)...(20): Xaa = Ala, Asp, Glu, Phe, Gly, Lys, Leu, Met, Asn, Gln, Arg, Ser, Thr, Val, Trp or Tyr
  MOD_RES (21)...(21): Xaa = Ala, Glu, Phe, His, Ile, Lys, Leu, Met, Pro, Gln, Arg, Thr, Val, Trp or Tyr
  MOD_RES (24)...(24): Xaa = Ala, Asp, Glu, Phe, Gly, His, Lys, Leu, Met, Asn, Gln, Arg, Ser, Thr, Val, Trp or Tyr
  MOD_RES (25)...(25): Xaa = Ala, Asp, Glu, Phe, Gly, His, Ile, Lys, Leu, Met, Asn, Gln, Arg, Ser, Thr, Val, Trp or Tyr
  MOD_RES (26)...(26): Xaa = Ala, Asp, Glu, Phe, His, Ile, Lys, Leu, Asn, Pro, Gln, Arg, Ser, Thr, Val, Trp or Tyr
  MOD_RES (27)...(27): Xaa = Asp, Glu, His, Asn, Gln, Ser or Thr
  MOD_RES (29)...(29): Xaa = Ala, Asp, Glu, Gly, His, Ile, Lys, Leu, Met, Pro, Gln, Arg, Ser, Thr or Val
  MOD_RES (30)...(30): Xaa = Asp, Gly, His, Asn, Gln, Ser, Thr or Tyr
  MOD_RES (31)...(31): Xaa = Ala, Asp, Glu, Phe, Gly, His, Lys, Leu, Met, Asn, Gln, Arg, Ser, Trp or Tyr
  MOD_RES (32)...(32): Xaa = Ala, Glu, Gly, Leu, Met, Arg, Ser or Thr
  MOD_RES (35)...(35): Xaa = Ala, Asp, Glu, Phe, Gly, His, Ile, Lys, Leu, Met, Asn, Gln, Arg, Ser, Thr, Val, Trp or Tyr
  MOD_RES (36)...(36): Xaa = Ala, Asp, Glu, Phe, Gly, His, Ile, Lys, Leu, Met, Asn, Pro, Gln, Arg or Ser
CXXXXXXXCXXXXXCXXXXXXCBXXXXCXXXXDEXXC

SEQ ID NO: 230 - protein, 38 aa, Artificial Sequence
  LDL receptor class A domain monomer sequence
  MOD_RES (2)...(2): Xaa = Ala, Asp, Glu, Phe, Gly, His, Lys, Leu, Asn, Pro, Arg, Ser or Thr
  MOD_RES (3)...(3): Xaa = Ala, Asp, Glu, Gly, His, Leu, Asn, Pro, Arg, Ser or Thr
  MOD_RES (4)...(4): Xaa = Asp, Phe, Gly, Lys, Leu, Asn, Pro, Gln, Arg, Ser, Thr, Val or Tyr
  MOD_RES (5)...(5): Xaa = Asp, Glu, Phe, Gly, His, Lys, Met, Asn, Arg, Ser, Thr or Val
  MOD_RES (6)...(6): Xaa = Asp, Glu, Gly, Lys, Leu, Asn, Pro, Gln or Arg
  MOD_RES (7)...(7): Xaa = Phe, His, Leu, Val or Trp
  MOD_RES (8)...(8): Xaa = Ala, Glu, Gly, Lys, Leu, Met, Arg, Ser, Thr or Val
  MOD_RES (10)...(10): Xaa = Ala, Asp, Glu, Gly, His, Lys, Leu, Asn, Pro, Gln, Arg, Ser, Thr, Val or Trp
  MOD_RES (11)...(11): Xaa = Asp, Glu, Gly, Ile, Lys, Leu, Asn, Pro, Gln, Arg, Ser, Thr or Val
  MOD_RES (12)...(12): Xaa = Ala, Asp, Glu, Gly, His, Ile, Lys, Asn, Pro, Gln, Arg, Ser, Thr or Tyr
  MOD_RES (13)...(13): Xaa = Ala, Asp, Glu, Phe, Gly, His, Ile, Lys, Leu, Asn, Pro, Gln, Arg, Ser, Thr, Val, Trp or Tyr
  MOD_RES (14)...(14): Xaa = Ala, Asp, Glu, Gly, His, Ile, Lys, Leu, Met, Asn, Gln, Arg, Thr or Val
  MOD_RES (16)...(16): Xaa = Ala, Phe, Ile, Lys, Leu, Thr, Val or Tyr
  MOD_RES (17)...(17): Xaa = Ala, Asp, Glu, Phe, Gly, His, Lys, Leu, Met, Asn, Pro, Gln, Arg, Ser, Thr, Val, Trp or Tyr
  MOD_RES (18)...(18): Xaa = Ala, Asp, Glu, Phe, Gly, His, Ile, Lys, Leu, Met, Asn, Pro, Gln, Arg, Ser, Thr, Val, or Tyr
  MOD_RES (19)...(19): Xaa = Ala, Asp, Glu, Phe, Gly, His, Ile, Lys, Leu, Met, Asn, Pro, Gln, Arg, Ser, Thr, Val, Trp or Tyr
  MOD_RES (20)...(20): Xaa = Ala, Asp, Glu, Phe, Gly, Lys, Leu, Met, Asn, Gln, Arg, Ser, Thr, Val, Trp or Tyr
  MOD_RES (21)...(21): Xaa = Ala, Glu, Phe, His, Ile, Lys, Leu, Met, Pro, Gln, Arg, Thr, Val, Trp or Tyr
  MOD_RES (24)...(24): Xaa = Ala, Asp, Glu, Phe, Gly, His, Lys, Leu, Met, Asn, Gln, Arg, Ser, Thr, Val, Trp or Tyr
  MOD_RES (25)...(25): Xaa = Ala, Asp, Glu, Phe, Gly, His, Ile, Lys, Leu, Met, Asn, Gln, Arg, Ser, Thr, Val, Trp or Tyr
  MOD_RES (26)...(26): Xaa = Ala, Asp, Glu, Phe, His, Ile, Lys, Leu, Asn, Pro, Gln, Arg, Ser, Thr, Val, Trp or Tyr
  MOD_RES (27)...(27): Xaa = Asp, Glu, His, Asn, Gln, Ser or Thr
  MOD_RES (29)...(29): Xaa = Ala, Asp, Phe, Gly, Leu, Met, Pro, Ser, Thr or Val
  MOD_RES (31)...(31): Xaa = Ala, Gly, His, Gln or Arg
  MOD_RES (32)...(32): Xaa = Ser, Thr or Tyr
  MOD_RES (35)...(35): Xaa = Ala, Glu, Gly, His, Leu, Met, Asn, Pro, Arg or Ser
  MOD_RES (36)...(36): Xaa = Ala, Asp, Glu, Gly, Asn, Pro, Gln, Val or Tyr
  MOD_RES (37)...(37): Xaa = Ala, Asp, Glu, His, Leu, Asn, Gln or Ser
CXXXXXXXCXXXXXCXXXXXXCBXXXXCXBXXDEXXXC

SEQ ID NO: 231 - protein, 39 aa, Artificial Sequence
  LDL receptor class A domain monomer sequence
  MOD_RES (2)...(2): Xaa = Ala, Asp, Glu, Phe, Gly, His, Lys, Leu, Asn, Pro, Arg, Ser or Thr
  MOD_RES (3)...(3): Xaa = Ala, Asp, Glu, Gly, His, Leu, Asn, Pro, Arg, Ser or Thr
  MOD_RES (4)...(4): Xaa = Asp, Phe, Gly, Lys, Leu, Asn, Pro, Gln, Arg, Ser, Thr, Val or Tyr
  MOD_RES (5)...(5): Xaa = Asp, Glu, Phe, Gly, His, Lys, Met, Asn, Arg, Ser, Thr or Val
  MOD_RES (6)...(6): Xaa = Asp, Glu, Gly, Lys, Leu, Asn, Pro, Gln or Arg
  MOD_RES (7)...(7): Xaa = Phe, His, Leu, Val or Trp
  MOD_RES (8)...(8): Xaa = Ala, Glu, Gly, Lys, Leu, Met, Arg, Ser, Thr or Val
  MOD_RES (10)...(10): Xaa = Ala, Asp, Glu, Gly, His, Lys, Leu, Asn, Pro, Gln, Arg, Ser, Thr, Val or Trp
  MOD_RES (11)...(11): Xaa = Asp, Glu, Gly, Ile, Lys, Leu, Asn, Pro, Gln, Arg, Ser, Thr or Val
  MOD_RES (12)...(12): Xaa = Ala, Asp, Glu, Gly, His, Ile, Lys, Asn, Pro, Gln, Arg, Ser, Thr or Tyr
  MOD_RES (13)...(13): Xaa = Ala, Asp, Glu, Phe, Gly, His, Ile, Lys, Leu, Asn, Pro, Gln, Arg, Ser, Thr, Val, Trp or Tyr
  MOD_RES (14)...(14): Xaa = Ala, Asp, Glu, Gly, His, Ile, Lys, Leu, Met, Asn, Gln, Arg, Thr or Val
  MOD_RES (16)...(16): Xaa = Ala, Phe, Ile, Lys, Leu, Thr, Val or Tyr
  MOD_RES (17)...(17): Xaa = Ala, Asp, Glu, Phe, Gly, His, Lys, Leu, Met, Asn, Pro, Gln, Arg, Ser, Thr, Val, Trp or Tyr
  MOD_RES (18)...(18): Xaa = Ala, Asp, Glu, Phe, Gly, His, Ile, Lys, Leu, Met, Asn, Pro, Gln, Arg, Ser, Thr, Val, or Tyr
  MOD_RES (19)...(19): Xaa = Ala, Asp, Glu, Phe, Gly, His, Ile, Lys, Leu, Met, Asn, Pro, Gln, Arg, Ser, Thr, Val, Trp or Tyr
  MOD_RES (20)...(20): Xaa = Ala, Asp, Glu, Phe, Gly, Lys, Leu, Met, Asn, Gln, Arg, Ser, Thr, Val, Trp or Tyr
  MOD_RES (21)...(21): Xaa = Ala, Glu, Phe, His, Ile, Lys, Leu, Met, Pro, Gln, Arg, Thr, Val, Trp or Tyr
  MOD_RES (24)...(24): Xaa = Ala, Asp, Glu, Phe, Gly, His, Lys, Leu, Met, Asn, Gln, Arg, Ser, Thr, Val, Trp or Tyr
  MOD_RES (25)...(25): Xaa = Ala, Asp, Glu, Phe, Gly, His, Ile, Lys, Leu, Met, Asn, Gln, Arg, Ser, Thr, Val, Trp or Tyr
  MOD_RES (26)...(26): Xaa = Ala, Asp, Glu, Phe, His, Ile, Lys, Leu, Asn, Pro, Gln, Arg, Ser, Thr, Val, Trp or Tyr
  MOD_RES (27)...(27): Xaa = Asp, Glu, His, Asn, Gln, Ser or Thr
  MOD_RES (29)...(29): Xaa = Glu, Gly, Lys, Leu, Pro, Gln, Arg or Ser
  MOD_RES (30)...(30): Xaa = Asp, Asn or Ser
  MOD_RES (31)...(31): Xaa = Asp, Phe, Gly, His, Lys, Asn, Gln, Arg, Ser, Trp or Tyr
  MOD_RES (32)...(32): Xaa = Ala, Glu, Leu, Ser or Thr
  MOD_RES (35)...(35): Xaa = Ala, Asp, Glu, Gly, Lys, Leu, Met, Asn, Pro, Ser, Thr or Trp
  MOD_RES (36)...(36): Xaa = Ala, Asp, Glu, His, Ile, Lys, Leu, Met, Asn, Pro, Gln, Arg or Ser
  MOD_RES (37)...(37): Xaa = Ala, Asp, Glu, Gly, His, Ile, Lys, Leu, Gln, Ser, Thr, Val or Tyr
  MOD_RES (38)...(38): Xaa = Ala, Glu, His, Ile, Leu, Met, Asn, Pro, Gln, Arg, Thr, Val or Tyr
CXXXXXXXCXXXXXCXXXXXXCBXXXXCXXXXDEXXXXC

SEQ ID NO: 232 - protein, 68 aa, Artificial Sequence
  EGF domain monomer sequence
  MOD_RES (2)...(15): Xaa = any amino acid, Xaa at positions 5-15 may be present or absent
  MOD_RES (17)...(23): Xaa = any amino acid, Xaa at positions 20-23 may be present or absent
  MOD_RES (25)...(40): Xaa = any amino acid, Xaa at positions 29-40 may be present or absent
  MOD_RES (42)...(43): Xaa = any amino acid, Xaa at position 43 may be present or absent
  MOD_RES (45)...(67): Xaa = any amino acid, Xaa at positions 53-67 may be present or absent
  DISULFID (1)...(24)
  DISULFID (16)...(44)
  DISULFID (41)...(68)
CXXXXXXXXXXXXXXCXXXXXXXCXXXXXXXXXXXXXXXXCXXCXXXXXXXXXXXXXXXXXXXXXXXC

SEQ ID NO: 233 - protein, 30 aa, Artificial Sequence
  EGF domain monomer sequence
  MOD_RES (2)...(2): Xaa = Ala, Asp, Glu, Phe, Gly, His, Ile, Lys, Leu, Asn, Pro, Gln, Arg, Ser, Thr, Val or Trp
  MOD_RES (3)...(3): Xaa = Ala, Asp, Glu, Gly, His, Lys, Leu, Met, Asn, Pro, Arg, Ser, Thr or Tyr
  MOD_RES (4)...(4): Xaa = Ala, Asp, Glu, Gly, His, Lys, Leu, Met, Asn, Pro, Gln, Arg, Ser, Thr, Val or Trp
  MOD_RES (5)...(5): Xaa = Ala, Glu, Gly, Met, Asn, Pro, Gln, Arg, Ser, Thr or Tyr
  MOD_RES (7)...(7): Xaa = Ala, Asp, Glu, Gly, His, Lys, Asn, Pro, Gln, Ser, Thr or Val
  MOD_RES (8)...(8): Xaa = Phe, Gly, His, Leu, Asn, Gln, Ser, Thr or Tyr
  MOD_RES (9)...(9): Xaa = Ala, Asp, Glu, Phe, Gly, His, Ile, Lys, Leu, Asn, Gln, Arg, Ser, Thr, Val or Tyr
  MOD_RES (11)...(11): Xaa = Ala, Asp, Glu, Phe, Gly, His, Ile, Lys, Leu, Met, Asn, Gln, Arg, Ser, Thr, Val, Trp or Tyr
  MOD_RES (12)...(12): Xaa = Ala, Asp, Glu, Lys, Leu, Asn, Pro, Gln, Arg, Ser, Thr or Val
  MOD_RES (13)...(13): Xaa = Ala, Cys, Asp, Glu, Phe, Gly, His, Ile, Lys, Leu, Met, Asn, Pro, Gln, Arg, Ser, Thr, Val or Tyr
  MOD_RES (14)...(14): Xaa = Ala, Asp, Glu, Phe, Gly, His, Ile, Lys, Leu, Met, Asn, Pro, Gln, Arg, Ser, Thr, Val, Trp or Tyr
  MOD_RES (15)...(15): Xaa = Ala, Asp, Glu, Phe, Gly, His, Ile, Lys, Leu, Asn, Pro, Gln, Arg, Ser, Thr, Val or Trp
  MOD_RES (16)...(16): Xaa = Ala, Asp, Glu, Gly, His, Lys, Leu, Met, Asn, Gln, Arg, Ser, Thr, Val, Trp or Tyr
  MOD_RES (17)...(17): Xaa = Ala, Phe, His, Ile, Leu, Pro, Arg, Thr, Val or Tyr
  MOD_RES (18)...(18): Xaa = Ala, Asp, Glu, Phe, His, Ile, Lys, Leu, Met, Asn, Gln, Arg, Ser, Thr, Val, Trp or Tyr
  MOD_RES (20)...(20): Xaa = Ala, Asp, Glu, Phe, Gly, His, Ile, Lys, Leu, Met, Asn, Pro, Gln, Arg, Ser, Thr, Val, Trp or Tyr
  MOD_RES (22)...(22): Xaa = Ala, Asp, Glu, Phe, His, Lys, Leu, Met, Asn, Pro, Gln, Arg, Ser, Thr, Val, Trp or Tyr
  MOD_RES (23)...(23): Xaa = Ala, Asp, Glu, Phe, Gly, His, Lys, Leu, Asn, Pro, Gln, Arg, Ser, Thr, Val or Tyr
  MOD_RES (24)...(24): Xaa = Ala, Glu, Gly, His, Lys, Leu, Asn, Pro, Arg, Ser, Thr or Tyr
  MOD_RES (25)...(25): Xaa = Phe, His, Ile, Leu, Met, Arg, Thr, Trp or Tyr
  MOD_RES (26)...(26): Xaa = Ala, Asp, Glu, Phe, Gly, His, Ile, Lys, Leu, Met, Asn, Gln, Arg, Ser, Thr, Val or Tyr
  MOD_RES (27)...(27): Xaa = Asp, Gly or Ser
  MOD_RES (28)...(28): Xaa = Ala, Asp, Glu, Phe, His, Ile, Lys, Leu, Asn, Pro, Gln, Arg, Ser, Thr, Val or Tyr
  MOD_RES (29)...(29): Xaa = Ala, Asp, Glu, Phe, His, Ile, Lys, Leu, Met, Asn, Gln, Arg, Ser, Thr or Tyr
CXXXXCXXXCXXXXXXXXCXCXXXXXXXXC

SEQ ID NO: 234 - protein, 31 aa, Artificial Sequence
  EGF domain monomer sequence
  MOD_RES (2)...(2): Xaa = Ala, Asp, Glu, Phe, Gly, His, Ile, Lys, Leu, Asn, Pro, Gln, Arg, Ser, Thr, Val or Trp
  MOD_RES (3)...(3): Xaa = Ala, Asp, Glu, Gly, His, Lys, Leu, Met, Asn, Pro, Arg, Ser, Thr or Tyr
  MOD_RES (4)...(4): Xaa = Ala, Asp, Glu, Gly, His, Lys, Leu, Met, Asn, Pro, Gln, Arg, Ser, Thr, Val or Trp
  MOD_RES (5)...(5): Xaa = Ala, Glu, Gly, Met, Asn, Pro, Gln, Arg, Ser, Thr or Tyr
  MOD_RES (7)...(7): Xaa = Ala, Asp, Glu, Gly, His, Lys, Asn, Pro, Gln, Ser, Thr or Val
  MOD_RES (8)...(8): Xaa = Phe, Gly, His, Leu, Asn, Gln, Ser, Thr or Tyr
  MOD_RES (9)...(9): Xaa = Ala, Asp, Glu, Phe, Gly, His, Ile, Lys, Leu, Asn, Gln, Arg, Ser, Thr, Val or Tyr
  MOD_RES (11)...(11): Xaa = Ala, Asp, Glu, Phe, Gly, His, Ile, Lys, Leu, Met, Asn, Gln, Arg, Ser, Thr, Val, Trp or Tyr
  MOD_RES (12)...(12): Xaa = Ala, Asp, Glu, Lys, Leu, Asn, Pro, Gln, Arg, Ser, Thr or Val
  MOD_RES (13)...(13): Xaa = Ala, Cys, Asp, Glu, Phe, Gly, His, Ile, Lys, Leu, Met, Asn, Pro, Gln, Arg, Ser, Thr, Val or Tyr
  MOD_RES (14)...(14): Xaa = Ala, Asp, Glu, Phe, Gly, His, Ile, Lys, Leu, Met, Asn, Pro, Gln, Arg, Ser, Thr, Val, Trp or Tyr
  MOD_RES (15)...(15): Xaa = Ala, Asp, Glu, Phe, Gly, His, Ile, Lys, Leu, Asn, Pro, Gln, Arg, Ser, Thr, Val or Trp
  MOD_RES (16)...(16): Xaa = Ala, Asp, Glu, Gly, His, Lys, Leu, Met, Asn, Gln, Arg, Ser, Thr, Val, Trp or Tyr
  MOD_RES (17)...(17): Xaa = Ala, Phe, His, Ile, Leu, Pro, Arg, Thr, Val or Tyr
  MOD_RES (18)...(18): Xaa = Ala, Asp, Glu, Phe, His, Ile, Lys, Leu, Met, Asn, Gln, Arg, Ser, Thr, Val, Trp or Tyr
  MOD_RES (20)...(20): Xaa = Ala, Asp, Glu, Phe, Gly, His, Ile, Lys, Leu, Met, Asn, Pro, Gln, Arg, Ser, Thr, Val, Trp or Tyr
  MOD_RES (22)...(22): Xaa = Ala, Asp, Glu, Phe, Gly, His, Ile, Lys, Leu, Asn, Pro, Gln, Arg, Ser, Thr, Val or Tyr
  MOD_RES (23)...(23): Xaa = Ala, Asp, Glu, Phe, His, Ile, Lys, Leu, Met, Asn, Pro, Gln, Arg, Ser, Thr or Val
  MOD_RES (24)...(24): Xaa = Asp, Glu, Gly, Asn, Pro or Ser
  MOD_RES (25)...(25): Xaa = Ala, Asp, Glu, Phe, His, Leu, Met, Gln, Arg, Ser, Thr, Trp or Tyr
  MOD_RES (26)...(26): Xaa = Ala, Asp, Glu, Phe, Gly, His, Ile, Lys, Leu, Met, Asn, Gln, Arg, Ser, Thr, Val or Tyr
  MOD_RES (27)...(27): Xaa = Ala, Phe, Gly, Ile, Lys, Leu, Met, Pro, Gln, Arg, Ser, Thr, Val, Trp or Tyr
  MOD_RES (28)...(28): Xaa = Ala, Asp, Glu, Phe, Gly, His, Lys, Leu, Met, Asn, Pro, Gln, Arg, Ser, Thr, Val or Trp
  MOD_RES (29)...(29): Xaa = Ala, Asp, Glu, Gly, Ile, Lys, Leu, Met, Asn, Pro, Gln, Arg, Ser, Thr, Val or Tyr
  MOD_RES (30)...(30): Xaa = Ala, Asp, Glu, Phe, Gly, His, Ile, Lys, Leu, Met, Asn, Gln, Ser, Thr or Val
CXXXXCXXXCXXXXXXXXCXCXXXXXXXXXC

SEQ ID NO: 235 - protein, 32 aa, Artificial Sequence
  EGF domain monomer sequence
  MOD_RES (2)...(2): Xaa = Ala, Asp, Glu, Phe, Gly, His, Ile, Lys, Leu, Asn, Pro, Gln, Arg, Ser, Thr, Val or Trp
  MOD_RES (3)...(3): Xaa = Ala, Asp, Glu, Gly, His, Lys, Leu, Met, Asn, Pro, Arg, Ser, Thr or Tyr
  MOD_RES (4)...(4): Xaa = Ala, Asp, Glu, Gly, His, Lys, Leu, Met, Asn, Pro, Gln, Arg, Ser, Thr, Val or Trp
  MOD_RES (5)...(5): Xaa = Ala, Glu, Gly, Met, Asn, Pro, Gln, Arg, Ser, Thr or Tyr
  MOD_RES (7)...(7): Xaa = Ala, Asp, Glu, Gly, His, Lys, Asn, Pro, Gln, Ser, Thr or Val
  MOD_RES (8)...(8): Xaa = Phe, Gly, His, Leu, Asn, Gln, Ser, Thr or Tyr
  MOD_RES (9)...(9): Xaa = Ala, Asp, Glu, Phe, Gly, His, Ile, Lys, Leu, Asn, Gln, Arg, Ser, Thr, Val or Tyr
  MOD_RES (11)...(11): Xaa = Ala, Asp, Glu, Phe, Gly, His, Ile, Lys, Leu, Met, Asn, Gln, Arg, Ser, Thr, Val, Trp or Tyr
  MOD_RES (12)...(12): Xaa = Ala, Asp, Glu, Lys, Leu, Asn, Pro, Gln, Arg, Ser, Thr or Val
  MOD_RES (13)...(13): Xaa = Ala, Cys, Asp, Glu, Phe, Gly, His, Ile, Lys, Leu, Met, Asn, Pro, Gln, Arg, Ser, Thr, Val or Tyr
  MOD_RES (14)...(14): Xaa = Ala, Asp, Glu, Phe, Gly, His, Ile, Lys, Leu, Met, Asn, Pro, Gln, Arg, Ser, Thr, Val, Trp or Tyr
  MOD_RES (15)...(15): Xaa = Ala, Asp, Glu, Phe, Gly, His, Ile, Lys, Leu, Asn, Pro, Gln, Arg, Ser, Thr, Val or Trp
  MOD_RES (16)...(16): Xaa = Ala, Asp, Glu, Gly, His, Lys, Leu, Met, Asn, Gln, Arg, Ser, Thr, Val, Trp or Tyr
  MOD_RES (17)...(17): Xaa = Ala, Phe, His, Ile, Leu, Pro, Arg, Thr, Val or Tyr
  MOD_RES (18)...(18): Xaa = Ala, Asp, Glu, Phe, His, Ile, Lys, Leu, Met, Asn, Gln, Arg, Ser, Thr, Val, Trp or Tyr
  MOD_RES (20)...(20): Xaa = Ala, Asp, Glu, Phe, Gly, His, Ile, Lys, Leu, Met, Asn, Pro, Gln, Arg, Ser, Thr, Val, Trp or Tyr
  MOD_RES (22)...(22): Xaa = Ala, Asp, Glu, Phe, Gly, His, Ile, Lys, Leu, Asn, Pro, Gln, Arg, Ser, Thr, Val or Tyr
  MOD_RES (23)...(23): Xaa = Ala, Asp, Glu, Phe, His, Ile, Lys, Leu, Met, Asn, Pro, Gln, Arg, Ser, Thr or Val
  MOD_RES (24)...(24): Xaa = Asp, Glu, Gly, Asn, Pro or Ser
  MOD_RES (25)...(25): Xaa = Ala, Asp, Glu, Phe, His, Leu, Met, Gln, Arg, Ser, Thr, Trp or Tyr
  MOD_RES (26)...(26): Xaa = Ala, Asp, Glu, Phe, Gly, His, Ile, Lys, Leu, Met, Asn, Gln, Arg, Ser, Thr, Val or Tyr
  MOD_RES (27)...(27): Xaa = Ala, Phe, Gly, Ile, Lys, Leu, Met, Pro, Gln, Arg, Ser, Thr, Val, Trp or Tyr
  MOD_RES (28)...(28): Xaa = Ala, Asp, Glu, Phe, Gly, His, Lys, Leu, Met, Asn, Pro, Gln, Arg, Ser, Thr, Val or Trp
  MOD_RES (29)...(29): Xaa = Ala, Asp, Glu, Gly, Ile, Lys, Leu, Met, Asn, Pro, Gln, Arg, Ser, Thr, Val or Tyr
  MOD_RES (30)...(30): Xaa = Ala, Asp, Glu, Phe, Gly, His, Ile, Lys, Leu, Met, Asn, Gln, Ser, Thr or Val
  MOD_RES (31)...(31): Xaa = Glu, Phe, Gly, His, Ile, Lys, Leu, Met, Asn, Pro, Gln, Arg, Ser, Thr or Trp
CXXXXCXXXCXXXXXXXXCXCXXXXXXXXXXC

SEQ ID NO: 236 - protein, 33 aa, Artificial Sequence
  EGF domain monomer sequence
  MOD_RES (2)...(2): Xaa = Ala, Asp, Glu, Phe, Gly, His, Ile, Lys, Leu, Asn, Pro, Gln, Arg, Ser, Thr, Val or Trp
  MOD_RES (3)...(3): Xaa = Ala, Asp, Glu, Gly, His, Lys, Leu, Met, Asn, Pro, Arg, Ser, Thr or Tyr
  MOD_RES (4)...(4): Xaa = Ala, Asp, Glu, Gly, His, Lys, Leu, Met, Asn, Pro, Gln, Arg, Ser, Thr, Val or Trp
  MOD_RES (5)...(5): Xaa = Ala, Glu, Gly, Met, Asn, Pro, Gln, Arg, Ser, Thr or Tyr
  MOD_RES (7)...(7): Xaa = Ala, Asp, Glu, Gly, His, Lys, Asn, Pro, Gln, Ser, Thr or Val
  MOD_RES (8)...(8): Xaa = Phe, Gly, His, Leu, Asn, Gln, Ser, Thr or Tyr
  MOD_RES (9)...(9): Xaa = Ala, Asp, Glu, Phe, Gly, His, Ile, Lys, Leu, Asn, Gln, Arg, Ser, Thr, Val or Tyr
  MOD_RES (11)...(11): Xaa = Ala, Asp, Glu, Phe, Gly, His, Ile, Lys, Leu, Met, Asn, Gln, Arg, Ser, Thr, Val, Trp or Tyr
  MOD_RES (12)...(12): Xaa = Ala, Asp, Glu, Lys, Leu, Asn, Pro, Gln, Arg, Ser, Thr or Val
  MOD_RES (13)...(13): Xaa = Ala, Cys, Asp, Glu, Phe, Gly, His, Ile, Lys, Leu, Met, Asn, Pro, Gln, Arg, Ser, Thr, Val or Tyr
  MOD_RES (14)...(14): Xaa = Ala, Asp, Glu, Phe, Gly, His, Ile, Lys, Leu, Met, Asn, Pro, Gln, Arg, Ser, Thr, Val, Trp or Tyr
  MOD_RES (15)...(15): Xaa = Ala, Asp, Glu, Phe, Gly, His, Ile, Lys, Leu, Asn, Pro, Gln, Arg, Ser, Thr, Val or Trp
  MOD_RES (16)...(16): Xaa = Ala, Asp, Glu, Gly, His, Lys, Leu, Met, Asn, Gln, Arg, Ser, Thr, Val, Trp or Tyr
  MOD_RES (17)...(17): Xaa = Ala, Phe, His, Ile, Leu, Pro, Arg, Thr, Val or Tyr
  MOD_RES (18)...(18): Xaa = Ala, Asp, Glu, Phe, His, Ile, Lys, Leu, Met, Asn, Gln, Arg, Ser, Thr, Val, Trp or Tyr
  MOD_RES (20)...(20): Xaa = Ala, Asp, Glu, Phe, Gly, His, Ile, Lys, Leu, Met, Asn, Pro, Gln, Arg, Ser, Thr, Val, Trp or Tyr
  MOD_RES (22)...(22): Xaa = Ala, Asp, Glu, Phe, Gly, His, Ile, Lys, Leu, Asn, Pro, Gln, Arg, Ser, Thr, Val or Tyr
  MOD_RES (23)...(23): Xaa = Ala, Asp, Glu, Phe, His, Ile, Lys, Leu, Met, Asn, Pro, Gln, Arg, Ser, Thr or Val
  MOD_RES (24)...(24): Xaa = Asp, Glu, Gly, Asn, Pro or Ser
  MOD_RES (25)...(25): Xaa = Ala, Asp, Glu, Phe, His, Leu, Met, Gln, Arg, Ser, Thr, Trp or Tyr
  MOD_RES (26)...(26): Xaa = Ala, Asp, Glu, Phe, Gly, His, Ile, Lys, Leu, Met, Asn, Gln, Arg, Ser, Thr, Val or Tyr
  MOD_RES (27)...(27): Xaa = Ala, Phe, Gly, Ile, Lys, Leu, Met, Pro, Gln, Arg, Ser, Thr, Val, Trp or Tyr
  MOD_RES (28)...(28): Xaa = Ala, Asp, Glu, Phe, Gly, His, Lys, Leu, Met, Asn, Pro, Gln, Arg, Ser, Thr, Val or Trp
  MOD_RES (29)...(29): Xaa = Ala, Asp, Glu, Gly, Ile, Lys, Leu, Met, Asn, Pro, Gln, Arg, Ser, Thr, Val or Tyr
  MOD_RES (30)...(30): Xaa = Ala, Asp, Glu, Phe, Gly, His, Ile, Lys, Leu, Met, Asn, Gln, Ser, Thr or Val
  MOD_RES (31)...(31): Xaa = Glu, Phe, Gly, His, Ile, Lys, Leu, Met, Asn, Pro, Gln, Arg, Ser, Thr or Trp
  MOD_RES (32)...(32): Xaa = Ala, Asp, Glu, Phe, Gly, His, Lys, Leu, Met, Asn, Pro, Gln, Arg, Ser, Thr, Val or Tyr
CXXXXCXXXCXXXXXXXXCXCXXXXXXXXXXXC

SEQ ID NO: 237 - protein, 34 aa, Artificial Sequence
  EGF domain monomer sequence
  MOD_RES (2)...(2): Xaa = Ala, Asp, Glu, Phe, Gly, His, Ile, Lys, Leu, Asn, Pro, Gln, Arg, Ser, Thr, Val or Trp
  MOD_RES (3)...(3): Xaa = Ala, Asp, Glu, Gly, His, Lys, Leu, Met, Asn, Pro, Arg, Ser, Thr or Tyr
  MOD_RES (4)...(4): Xaa = Ala, Asp, Glu, Gly, His, Lys, Leu, Met, Asn, Pro, Gln, Arg, Ser, Thr, Val or Trp
  MOD_RES (5)...(5): Xaa = Ala, Glu, Gly, Met, Asn, Pro, Gln, Arg, Ser, Thr or Tyr
  MOD_RES (7)...(7): Xaa = Ala, Asp, Glu, Gly, His, Lys, Asn, Pro, Gln, Ser, Thr or Val
  MOD_RES (8)...(8): Xaa = Phe, Gly, His, Leu, Asn, Gln, Ser, Thr or Tyr
  MOD_RES (9)...(9): Xaa = Ala, Asp, Glu, Phe, Gly, His, Ile, Lys, Leu, Asn, Gln, Arg, Ser, Thr, Val or Tyr
  MOD_RES (11)...(11): Xaa = Ala, Asp, Glu, Phe, Gly, His, Ile, Lys, Leu, Met, Asn, Gln, Arg, Ser, Thr, Val, Trp or Tyr
  MOD_RES (12)...(12): Xaa = Ala, Asp, Glu, Lys, Leu, Asn, Pro, Gln, Arg, Ser, Thr or Val
  MOD_RES (13)...(13): Xaa = Ala, Cys, Asp, Glu, Phe, Gly, His, Ile, Lys, Leu, Met, Asn, Pro, Gln, Arg, Ser, Thr, Val or Tyr
  MOD_RES (14)...(14): Xaa = Ala, Asp, Glu, Phe, Gly, His, Ile, Lys, Leu, Met, Asn, Pro, Gln, Arg, Ser, Thr, Val, Trp or Tyr
  MOD_RES (15)...(15): Xaa = Ala, Asp, Glu, Phe, Gly, His, Ile, Lys, Leu, Asn, Pro, Gln, Arg, Ser, Thr, Val or Trp
  MOD_RES (16)...(16): Xaa = Ala, Asp, Glu, Gly, His, Lys, Leu, Met, Asn, Gln, Arg, Ser, Thr, Val, Trp or Tyr
  MOD_RES (17)...(17): Xaa = Ala, Phe, His, Ile, Leu, Pro, Arg, Thr, Val or Tyr
  MOD_RES (18)...(18): Xaa = Ala, Asp, Glu, Phe, His, Ile, Lys, Leu, Met, Asn, Gln, Arg, Ser, Thr, Val, Trp or Tyr
  MOD_RES (20)...(20): Xaa = Ala, Asp, Glu, Phe, Gly, His, Ile, Lys, Leu, Met, Asn, Pro, Gln, Arg, Ser, Thr, Val, Trp or Tyr
  MOD_RES (22)...(22): Xaa = Ala, Asp, Glu, Phe, Gly, His, Ile, Lys, Leu, Asn, Pro, Gln, Arg, Ser, Thr, Val or Tyr
  MOD_RES (23)...(23): Xaa = Ala, Asp, Glu, Phe, His, Ile, Lys, Leu, Met, Asn, Pro, Gln, Arg, Ser, Thr or Val
  MOD_RES (24)...(24): Xaa = Asp, Glu, Gly, Asn, Pro or Ser
  MOD_RES (25)...(25): Xaa = Ala, Asp, Glu, Phe, His, Leu, Met, Gln, Arg, Ser, Thr, Trp or Tyr
  MOD_RES (26)...(26): Xaa = Ala, Asp, Glu, Phe, Gly, His, Ile, Lys, Leu, Met, Asn, Gln, Arg, Ser, Thr, Val or Tyr
  MOD_RES (27)...(27): Xaa = Ala, Phe, Gly, Ile, Lys, Leu, Met, Pro, Gln, Arg, Ser, Thr, Val, Trp or Tyr
  MOD_RES (28)...(28): Xaa = Ala, Asp, Glu, Phe, Gly, His, Lys, Leu, Met, Asn, Pro, Gln, Arg, Ser, Thr, Val or Trp
  MOD_RES (29)...(29): Xaa = Ala, Asp, Glu, Gly, Ile, Lys, Leu, Met, Asn, Pro, Gln, Arg, Ser, Thr, Val or Tyr
  MOD_RES (30)...(30): Xaa = Ala, Asp, Glu, Phe, Gly, His, Ile, Lys, Leu, Met, Asn, Gln, Ser, Thr or Val
  MOD_RES (31)...(31): Xaa = Glu, Phe, Gly, His, Ile, Lys, Leu, Met, Asn, Pro, Gln, Arg, Ser, Thr or Trp
  MOD_RES (32)...(32): Xaa = Ala, Asp, Glu, Phe, Gly, His, Lys, Leu, Met, Asn, Pro, Gln, Arg, Ser, Thr, Val or Tyr
  MOD_RES (33)...(33): Xaa = Ala, Asp, Glu, Phe, Gly, His, Ile, Lys, Met, Asn, Gln, Arg, Ser, Thr, Val or Tyr
CXXXXCXXXCXXXXXXXXCXCXXXXXXXXXXXXC

SEQ ID NO: 238 - protein, 31 aa, Artificial Sequence
  EGF domain monomer sequence
  MOD_RES (2)...(2): Xaa = Ala, Asp, Glu, Gly, Ile, Lys, Leu, Gln, Arg, Ser, Thr or Val
  MOD_RES (3)...(3): Xaa = Ala, Asp, Glu, Phe, Gly, His, Ile, Lys, Leu, Met, Asn, Pro, Gln, Arg, Ser, Thr or Val
  MOD_RES (4)...(4): Xaa = Ala, Glu, Phe, Gly, His, Leu, Asn, Pro, Gln, Arg, Ser, Thr, Trp or Tyr
  MOD_RES (5)...(5): Xaa = Ala, Asp, Glu, Phe, Gly, His, Ile, Lys, Leu, Asn, Pro, Arg, Ser or Thr
  MOD_RES (6)...(6): Xaa = Ala, Phe, Gly, Ile, Lys, Leu, Met, Asn, Pro, Gln, Arg, Ser, Thr, Val or Tyr
  MOD_RES (8)...(8): Xaa = Ala, Asp, Glu, Gly, His, Lys, Asn, Pro, Gln, Ser, Thr or Val
  MOD_RES (9)...(9): Xaa = Phe, Gly, His, Leu, Asn, Gln, Ser, Thr or Tyr
  MOD_RES (10)...(10): Xaa = Ala, Asp, Glu, Phe, Gly, His, Ile, Lys, Leu, Asn, Gln, Arg, Ser, Thr, Val or Tyr
  MOD_RES (12)...(12): Xaa = Ala, Asp, Glu, Phe, Gly, His, Ile, Lys, Leu, Met, Asn, Gln, Arg, Ser, Thr, Val, Trp or Tyr
  MOD_RES (13)...(13): Xaa = Ala, Asp, Glu, Lys, Leu, Asn, Pro, Gln, Arg, Ser, Thr or Val
  MOD_RES (14)...(14): Xaa = Ala, Cys, Asp, Glu, Phe, Gly, His, Ile, Lys, Leu, Met, Asn, Pro, Gln, Arg, Ser, Thr, Val or Tyr
  MOD_RES (15)...(15): Xaa = Ala, Asp, Glu, Phe, Gly, His, Ile, Lys, Leu, Met, Asn, Pro, Gln, Arg, Ser, Thr, Val, Trp or Tyr
  MOD_RES (16)...(16): Xaa = Ala, Asp, Glu, Phe, Gly, His, Ile, Lys, Leu, Asn, Pro, Gln, Arg, Ser, Thr, Val or Trp
  MOD_RES (17)...(17): Xaa = Ala, Asp, Glu, Gly, His, Lys, Leu, Met, Asn, Gln, Arg, Ser, Thr, Val, Trp or Tyr
  MOD_RES (18)...(18): Xaa = Ala, Phe, His, Ile, Leu, Pro, Arg, Thr, Val or Tyr
  MOD_RES (19)...(19): Xaa = Ala, Asp, Glu, Phe, His, Ile, Lys, Leu, Met, Asn, Gln, Arg, Ser, Thr, Val, Trp or Tyr
  MOD_RES (21)...(21): Xaa = Ala, Asp, Glu, Phe, Gly, His, Ile, Lys, Leu, Met, Asn, Pro, Gln, Arg, Ser, Thr, Val, Trp or Tyr
  MOD_RES (23)...(23): Xaa = Ala, Asp, Glu, Phe, His, Lys, Leu, Met, Asn, Pro, Gln, Arg, Ser, Thr, Val, Trp or Tyr
  MOD_RES (24)...(24): Xaa = Ala, Asp, Glu, Phe, Gly, His, Lys, Leu, Asn, Pro, Gln, Arg, Ser, Thr, Val or Tyr
  MOD_RES (25)...(25): Xaa = Ala, Glu, Gly, His, Lys, Leu, Asn, Pro, Arg, Ser, Thr or Tyr
  MOD_RES (26)...(26): Xaa = Phe, His, Ile, Leu, Met, Arg, Thr, Trp or Tyr
  MOD_RES (27)...(27): Xaa = Ala, Asp, Glu, Phe, Gly, His, Ile, Lys, Leu, Met, Asn, Gln, Arg, Ser, Thr, Val or Tyr
  MOD_RES (28)...(28): Xaa = Asp, Gly or Ser
  MOD_RES (29)...(29): Xaa = Ala, Asp, Glu, Phe, His, Ile, Lys, Leu, Asn, Pro, Gln, Arg, Ser, Thr, Val or Tyr
  MOD_RES (30)...(30): Xaa = Ala, Asp, Glu, Phe, His, Ile, Lys, Leu, Met, Asn, Gln, Arg, Ser, Thr or Tyr
CXXXXXCXXXCXXXXXXXXCXCXXXXXXXXC

SEQ ID NO: 239 - protein, 32 aa, Artificial Sequence
  EGF domain monomer sequence
  MOD_RES (2)...(2): Xaa = Ala, Asp, Glu, Gly, Ile, Lys, Leu, Gln, Arg, Ser, Thr or Val
  MOD_RES (3)...(3): Xaa = Ala, Asp, Glu, Phe, Gly, His, Ile, Lys, Leu, Met, Asn, Pro, Gln, Arg, Ser, Thr or Val
  MOD_RES (4)...(4): Xaa = Ala, Glu, Phe, Gly, His, Leu, Asn, Pro, Gln, Arg, Ser, Thr, Trp or Tyr
  MOD_RES (5)...(5): Xaa = Ala, Asp, Glu, Phe, Gly, His, Ile, Lys, Leu, Asn, Pro, Arg, Ser or Thr
  MOD_RES (6)...(6): Xaa = Ala, Phe, Gly, Ile, Lys, Leu, Met, Asn, Pro, Gln, Arg, Ser, Thr, Val or Tyr
  MOD_RES (8)...(8): Xaa = Ala, Asp, Glu, Gly, His, Lys, Asn, Pro, Gln, Ser, Thr or Val
  MOD_RES (9)...(9): Xaa = Phe, Gly, His, Leu, Asn, Gln, Ser, Thr or Tyr
  MOD_RES (10)...(10): Xaa = Ala, Asp, Glu, Phe, Gly, His, Ile, Lys, Leu, Asn, Gln, Arg, Ser, Thr, Val or Tyr
  MOD_RES (12)...(12): Xaa = Ala, Asp, Glu, Phe, Gly, His, Ile, Lys, Leu, Met, Asn, Gln, Arg, Ser, Thr, Val, Trp or Tyr
  MOD_RES (13)...(13): Xaa = Ala, Asp, Glu, Lys, Leu, Asn, Pro, Gln, Arg, Ser, Thr or Val
  MOD_RES (14)...(14): Xaa = Ala, Cys, Asp, Glu, Phe, Gly, His, Ile, Lys, Leu, Met, Asn, Pro, Gln, Arg, Ser, Thr, Val or Tyr
  MOD_RES (15)...(15): Xaa = Ala, Asp, Glu, Phe, Gly, His, Ile, Lys, Leu, Met, Asn, Pro, Gln, Arg, Ser, Thr, Val, Trp or Tyr
  MOD_RES (16)...(16): Xaa = Ala, Asp, Glu, Phe, Gly, His, Ile, Lys, Leu, Asn, Pro, Gln, Arg, Ser, Thr, Val or Trp
  MOD_RES (17)...(17): Xaa = Ala, Asp, Glu, Gly, His, Lys, Leu, Met, Asn, Gln, Arg, Ser, Thr, Val, Trp or Tyr
  MOD_RES (18)...(18): Xaa = Ala, Phe, His, Ile, Leu, Pro, Arg, Thr, Val or Tyr
  MOD_RES (19)...(19): Xaa = Ala, Asp, Glu, Phe, His, Ile, Lys, Leu, Met, Asn, Gln, Arg, Ser, Thr, Val, Trp or Tyr
  MOD_RES (21)...(21): Xaa = Ala, Asp, Glu, Phe, Gly, His, Ile, Lys, Leu, Met, Asn, Pro, Gln, Arg, Ser, Thr, Val, Trp or Tyr
  MOD_RES (23)...(23): Xaa = Ala, Asp, Glu, Phe, Gly, His, Ile, Lys, Leu, Asn, Pro, Gln, Arg, Ser, Thr, Val or Tyr
  MOD_RES (24)...(24): Xaa = Ala, Asp, Glu, Phe, His, Ile, Lys, Leu, Met, Asn, Pro, Gln, Arg, Ser, Thr or Val
  MOD_RES (25)...(25): Xaa = Asp, Glu, Gly, Asn, Pro or Ser
  MOD_RES (26)...(26): Xaa = Ala, Asp, Glu, Phe, His, Leu, Met, Gln, Arg, Ser, Thr, Trp or Tyr
  MOD_RES (27)...(27): Xaa = Ala, Asp, Glu, Phe, Gly, His, Ile, Lys, Leu, Met, Asn, Gln, Arg, Ser, Thr, Val or Tyr
  MOD_RES (28)...(28): Xaa = Ala, Phe, Gly, Ile, Lys, Leu, Met, Pro, Gln, Arg, Ser, Thr, Val, Trp or Tyr
  MOD_RES (29)...(29): Xaa = Ala, Asp, Glu, Phe, Gly, His, Lys, Leu, Met, Asn, Pro, Gln, Arg, Ser, Thr, Val or Trp
  MOD_RES (30)...(30): Xaa = Ala, Asp, Glu, Gly, Ile, Lys, Leu, Met, Asn, Pro, Gln, Arg, Ser, Thr, Val or Tyr
  MOD_RES (31)...(31): Xaa = Ala, Asp, Glu, Phe, Gly, His, Ile, Lys, Leu, Met, Asn, Gln, Ser, Thr or Val
CXXXXXCXXXCXXXXXXXXCXCXXXXXXXXXC

SEQ ID NO: 240 - protein, 33 aa, Artificial Sequence
  EGF domain monomer sequence
  MOD_RES (2)...(2): Xaa = Ala, Asp, Glu, Gly, Ile, Lys, Leu, Gln, Arg, Ser, Thr or Val
  MOD_RES (3)...(3): Xaa = Ala, Asp, Glu, Phe, Gly, His, Ile, Lys, Leu, Met, Asn, Pro, Gln, Arg, Ser, Thr or Val
  MOD_RES (4)...(4): Xaa = Ala, Glu, Phe, Gly, His, Leu, Asn, Pro, Gln, Arg, Ser, Thr, Trp or Tyr
  MOD_RES (5)...(5): Xaa = Ala, Asp, Glu, Phe, Gly, His, Ile, Lys, Leu, Asn, Pro, Arg, Ser or Thr
  MOD_RES (6)...(6): Xaa = Ala, Phe, Gly, Ile, Lys, Leu, Met, Asn, Pro, Gln, Arg, Ser, Thr, Val or Tyr
  MOD_RES (8)...(8): Xaa = Ala, Asp, Glu, Gly, His, Lys, Asn, Pro, Gln, Ser, Thr or Val
  MOD_RES (9)...(9): Xaa = Phe, Gly, His, Leu, Asn, Gln, Ser, Thr or Tyr
  MOD_RES (10)...(10): Xaa = Ala, Asp, Glu, Phe, Gly, His, Ile, Lys, Leu, Asn, Gln, Arg, Ser, Thr, Val or Tyr
  MOD_RES (12)...(12): Xaa = Ala, Asp, Glu, Phe, Gly, His, Ile, Lys, Leu, Met, Asn, Gln, Arg, Ser, Thr, Val, Trp or Tyr
  MOD_RES (13)...(13): Xaa = Ala, Asp, Glu, Lys, Leu, Asn, Pro, Gln, Arg, Ser, Thr or Val
  MOD_RES (14)...(14): Xaa = Ala, Cys, Asp, Glu, Phe, Gly, His, Ile, Lys, Leu, Met, Asn, Pro, Gln, Arg, Ser, Thr, Val or Tyr
  MOD_RES (15)...(15): Xaa = Ala, Asp, Glu, Phe, Gly, His, Ile, Lys, Leu, Met, Asn, Pro, Gln, Arg, Ser, Thr, Val, Trp or Tyr
  MOD_RES (16)...(16): Xaa = Ala, Asp, Glu, Phe, Gly, His, Ile, Lys, Leu, Asn, Pro, Gln, Arg, Ser, Thr, Val or Trp
  MOD_RES (17)...(17): Xaa = Ala, Asp, Glu, Gly, His, Lys, Leu, Met, Asn, Gln, Arg, Ser, Thr, Val, Trp or Tyr
  MOD_RES (18)...(18): Xaa = Ala, Phe, His, Ile, Leu, Pro, Arg, Thr, Val or Tyr
  MOD_RES (19)...(19): Xaa = Ala, Asp, Glu, Phe, His, Ile, Lys, Leu, Met, Asn, Gln, Arg, Ser, Thr, Val, Trp or Tyr
  MOD_RES (21)...(21): Xaa = Ala, Asp, Glu, Phe, Gly, His, Ile, Lys, Leu, Met, Asn, Pro, Gln, Arg, Ser, Thr, Val, Trp or Tyr
  MOD_RES (23)...(23): Xaa = Ala, Asp, Glu, Phe, Gly, His, Ile, Lys, Leu, Asn, Pro, Gln, Arg, Ser, Thr, Val or Tyr
  MOD_RES (24)...(24): Xaa = Ala, Asp, Glu, Phe, His, Ile, Lys, Leu, Met, Asn, Pro, Gln, Arg, Ser, Thr or Val
  MOD_RES (25)...(25): Xaa = Asp, Glu, Gly, Asn, Pro or Ser
  MOD_RES (26)...(26): Xaa = Ala, Asp, Glu, Phe, His, Leu, Met, Gln, Arg, Ser, Thr, Trp or Tyr
  MOD_RES (27)...(27): Xaa = Ala, Asp, Glu, Phe, Gly, His, Ile, Lys, Leu, Met, Asn, Gln, Arg, Ser, Thr, Val or Tyr
  MOD_RES (28)...(28): Xaa = Ala, Phe, Gly, Ile, Lys, Leu, Met, Pro, Gln, Arg, Ser, Thr, Val, Trp or Tyr
  MOD_RES (29)...(29): Xaa = Ala, Asp, Glu, Phe, Gly, His, Lys, Leu, Met, Asn, Pro, Gln, Arg, Ser, Thr, Val or Trp
  MOD_RES (30)...(30): Xaa = Ala, Asp, Glu, Gly, Ile, Lys, Leu, Met, Asn, Pro, Gln, Arg, Ser, Thr, Val or Tyr
  MOD_RES (31)...(31): Xaa = Ala, Asp, Glu, Phe, Gly, His, Ile, Lys, Leu, Met, Asn, Gln, Ser, Thr or Val
  MOD_RES (32)...(32): Xaa = Glu, Phe, Gly, His, Ile, Lys, Leu, Met, Asn, Pro, Gln, Arg, Ser, Thr or Trp
CXXXXXCXXXCXXXXXXXXCXCXXXXXXXXXXC

SEQ ID NO: 241 - protein, 34 aa, Artificial Sequence
  EGF domain monomer sequence
  MOD_RES (2)...(2): Xaa = Ala, Asp, Glu, Gly, Ile, Lys, Leu, Gln, Arg, Ser, Thr or Val
  MOD_RES (3)...(3): Xaa = Ala, Asp, Glu, Phe, Gly, His, Ile, Lys, Leu, Met, Asn, Pro, Gln, Arg, Ser, Thr or Val
  MOD_RES (4)...(4): Xaa = Ala, Glu, Phe, Gly, His, Leu, Asn, Pro, Gln, Arg, Ser, Thr, Trp or Tyr
  MOD_RES (5)...(5): Xaa = Ala, Asp, Glu, Phe, Gly, His, Ile, Lys, Leu, Asn, Pro, Arg, Ser or Thr
  MOD_RES (6)...(6): Xaa = Ala, Phe, Gly, Ile, Lys, Leu, Met, Asn, Pro, Gln, Arg, Ser, Thr, Val or Tyr
  MOD_RES (8)...(8): Xaa = Ala, Asp, Glu, Gly, His, Lys, Asn, Pro, Gln, Ser, Thr or Val
  MOD_RES (9)...(9): Xaa = Phe, Gly, His, Leu, Asn, Gln, Ser, Thr or Tyr
  MOD_RES (10)...(10): Xaa = Ala, Asp, Glu, Phe, Gly, His, Ile, Lys, Leu, Asn, Gln, Arg, Ser, Thr, Val or Tyr
  MOD_RES (12)...(12): Xaa = Ala, Asp, Glu, Phe, Gly, His, Ile, Lys, Leu, Met, Asn, Gln, Arg, Ser, Thr, Val, Trp or Tyr
  MOD_RES (13)...(13): Xaa = Ala, Asp, Glu, Lys, Leu, Asn, Pro, Gln, Arg, Ser, Thr or Val
  MOD_RES (14)...(14): Xaa = Ala, Cys, Asp, Glu, Phe, Gly, His, Ile, Lys, Leu, Met, Asn, Pro, Gln, Arg, Ser, Thr, Val or Tyr
  MOD_RES (15)...(15): Xaa = Ala, Asp, Glu, Phe, Gly, His, Ile, Lys, Leu, Met, Asn, Pro, Gln, Arg, Ser, Thr, Val, Trp or Tyr
  MOD_RES (16)...(16): Xaa = Ala, Asp, Glu, Phe, Gly, His, Ile, Lys, Leu, Asn, Pro, Gln, Arg, Ser, Thr, Val or Trp
  MOD_RES (17)...(17): Xaa = Ala, Asp, Glu, Gly, His, Lys, Leu, Met, Asn, Gln, Arg, Ser, Thr, Val, Trp or Tyr
  MOD_RES (18)...(18): Xaa = Ala, Phe, His, Ile, Leu, Pro, Arg, Thr, Val or Tyr
  MOD_RES (19)...(19): Xaa = Ala, Asp, Glu, Phe, His, Ile, Lys, Leu, Met, Asn, Gln, Arg, Ser, Thr, Val, Trp or Tyr
  MOD_RES (21)...(21): Xaa = Ala, Asp, Glu, Phe, Gly, His, Ile, Lys, Leu, Met, Asn, Pro, Gln, Arg, Ser, Thr, Val, Trp or Tyr
  MOD_RES (23)...(23): Xaa = Ala, Asp, Glu, Phe, Gly, His, Ile, Lys, Leu, Asn, Pro, Gln, Arg, Ser, Thr, Val or Tyr
  MOD_RES (24)...(24): Xaa = Ala, Asp, Glu, Phe, His, Ile, Lys, Leu, Met, Asn, Pro, Gln, Arg, Ser, Thr or Val
  MOD_RES (25)...(25): Xaa = Asp, Glu, Gly, Asn, Pro or Ser
  MOD_RES (26)...(26): Xaa = Ala, Asp, Glu, Phe, His, Leu, Met, Gln, Arg, Ser, Thr, Trp or Tyr
  MOD_RES (27)...(27): Xaa = Ala, Asp, Glu, Phe, Gly, His, Ile, Lys, Leu, Met, Asn, Gln, Arg, Ser, Thr, Val or Tyr
  MOD_RES (28)...(28): Xaa = Ala, Phe, Gly, Ile, Lys, Leu, Met, Pro, Gln, Arg, Ser, Thr, Val, Trp or Tyr
  MOD_RES (29)...(29): Xaa = Ala, Asp, Glu, Phe, Gly, His, Lys, Leu, Met, Asn, Pro, Gln, Arg, Ser, Thr, Val or Trp
  MOD_RES (30)...(30): Xaa = Ala, Asp, Glu, Gly, Ile, Lys, Leu, Met, Asn, Pro, Gln, Arg, Ser, Thr, Val or Tyr
  MOD_RES (31)...(31): Xaa = Ala, Asp, Glu, Phe, Gly, His, Ile, Lys, Leu, Met, Asn, Gln, Ser, Thr or Val
  MOD_RES (32)...(32): Xaa = Glu, Phe, Gly, His, Ile, Lys, Leu, Met, Asn, Pro, Gln, Arg, Ser, Thr or Trp
  MOD_RES (33)...(33): Xaa = Ala, Asp, Glu, Phe, Gly, His, Lys, Leu, Met, Asn, Pro, Gln, Arg, Ser, Thr, Val or Tyr
CXXXXXCXXXCXXXXXXXXCXCXXXXXXXXXXXC

SEQ ID NO: 242 - protein, 35 aa, Artificial Sequence
  EGF domain monomer sequence
  MOD_RES (2)...(2): Xaa = Ala, Asp, Glu, Gly, Ile, Lys, Leu, Gln, Arg, Ser, Thr or Val
  MOD_RES (3)...(3): Xaa = Ala, Asp, Glu, Phe, Gly, His, Ile, Lys, Leu, Met, Asn, Pro, Gln, Arg, Ser, Thr or Val
  MOD_RES (4)...(4): Xaa = Ala, Glu, Phe, Gly, His, Leu, Asn, Pro, Gln, Arg, Ser, Thr, Trp or Tyr
  MOD_RES (5)...(5): Xaa = Ala, Asp, Glu, Phe, Gly, His, Ile, Lys, Leu, Asn, Pro, Arg, Ser or Thr
  MOD_RES (6)...(6): Xaa = Ala, Phe, Gly, Ile, Lys, Leu, Met, Asn, Pro, Gln, Arg, Ser, Thr, Val or Tyr
  MOD_RES (8)...(8): Xaa = Ala, Asp, Glu, Gly, His, Lys, Asn, Pro, Gln, Ser, Thr or Val
  MOD_RES (9)...(9): Xaa = Phe, Gly, His, Leu, Asn, Gln, Ser, Thr or Tyr
  MOD_RES (10)...(10): Xaa = Ala, Asp, Glu, Phe, Gly, His, Ile, Lys, Leu, Asn, Gln, Arg, Ser, Thr, Val or Tyr
  MOD_RES (12)...(12): Xaa = Ala, Asp, Glu, Phe, Gly, His, Ile, Lys, Leu, Met, Asn, Gln, Arg, Ser, Thr, Val, Trp or Tyr
  MOD_RES (13)...(13): Xaa = Ala, Asp, Glu, Lys, Leu, Asn, Pro, Gln, Arg, Ser, Thr or Val
  MOD_RES (14)...(14): Xaa = Ala, Cys, Asp, Glu, Phe, Gly, His, Ile, Lys, Leu, Met, Asn, Pro, Gln, Arg, Ser, Thr, Val or Tyr
  MOD_RES (15)...(15): Xaa = Ala, Asp, Glu, Phe, Gly, His, Ile, Lys, Leu, Met, Asn, Pro, Gln, Arg, Ser, Thr, Val, Trp or Tyr
  MOD_RES (16)...(16): Xaa = Ala, Asp, Glu, Phe, Gly, His, Ile, Lys, Leu, Asn, Pro, Gln, Arg, Ser, Thr, Val or Trp
  MOD_RES (17)...(17): Xaa = Ala, Asp, Glu, Gly, His, Lys, Leu, Met, Asn, Gln, Arg, Ser, Thr, Val, Trp or Tyr
  MOD_RES (18)...(18): Xaa = Ala, Phe, His, Ile, Leu, Pro, Arg, Thr, Val or Tyr
  MOD_RES (19)...(19): Xaa = Ala, Asp, Glu, Phe, His, Ile, Lys, Leu, Met, Asn, Gln, Arg, Ser, Thr, Val, Trp or Tyr
  MOD_RES (21)...(21): Xaa = Ala, Asp, Glu, Phe, Gly, His, Ile, Lys, Leu, Met, Asn, Pro, Gln, Arg, Ser, Thr, Val, Trp or Tyr
  MOD_RES (23)...(23): Xaa = Ala, Asp, Glu, Phe, Gly, His, Ile, Lys, Leu, Asn, Pro, Gln, Arg, Ser, Thr, Val or Tyr
  MOD_RES (24)...(24): Xaa = Ala, Asp, Glu, Phe, His, Ile, Lys, Leu, Met, Asn, Pro, Gln, Arg, Ser, Thr or Val
  MOD_RES (25)...(25): Xaa = Asp, Glu, Gly, Asn, Pro or Ser
  MOD_RES (26)...(26): Xaa = Ala, Asp, Glu, Phe, His, Leu, Met, Gln, Arg, Ser, Thr, Trp or Tyr
  MOD_RES (27)...(27): Xaa = Ala, Asp, Glu, Phe, Gly, His, Ile, Lys, Leu, Met, Asn, Gln, Arg, Ser, Thr, Val or Tyr
  MOD_RES (28)...(28): Xaa = Ala, Phe, Gly, Ile, Lys, Leu, Met, Pro, Gln, Arg, Ser, Thr, Val, Trp or Tyr
  MOD_RES (29)...(29): Xaa = Ala, Asp, Glu, Phe, Gly, His, Lys, Leu, Met, Asn, Pro, Gln, Arg, Ser, Thr, Val or Trp
  MOD_RES (30)...(30): Xaa = Ala, Asp, Glu, Gly, Ile, Lys, Leu, Met, Asn, Pro, Gln, Arg, Ser, Thr, Val or Tyr
  MOD_RES (31)...(31): Xaa = Ala, Asp, Glu, Phe, Gly, His, Ile, Lys, Leu, Met, Asn, Gln, Ser, Thr or Val
  MOD_RES (32)...(32): Xaa = Glu, Phe, Gly, His, Ile, Lys, Leu, Met, Asn, Pro, Gln, Arg, Ser, Thr or Trp
  MOD_RES (33)...(33): Xaa = Ala, Asp, Glu, Phe, Gly, His, Lys, Leu, Met, Asn, Pro, Gln, Arg, Ser, Thr, Val or Tyr
  MOD_RES (34)...(34): Xaa = Ala, Asp, Glu, Phe, Gly, His, Ile, Lys, Met, Asn, Gln, Arg, Ser, Thr, Val or Tyr
CXXXXXCXXXCXXXXXXXXCXCXXXXXXXXXXXXC

SEQ ID NO: 243 - protein, 32 aa, Artificial Sequence
  EGF domain monomer sequence
  MOD_RES (2)...(2): Xaa = Ala, Asp, Glu, Phe, Gly, Ile, Lys, Leu, Met, Asn, Pro, Gln, Arg, Ser, Thr, Val or Tyr
  MOD_RES (3)...(3): Xaa = Ala, Asp, Glu, Phe, Gly, His, Ile, Lys, Leu, Met, Asn, Pro, Gln, Arg, Ser, Thr, Val or Tyr
  MOD_RES (4)...(4): Xaa = Ala, Asp, Glu, Phe, Gly, His, Ile, Lys, Leu, Met, Asn, Pro, Gln, Arg, Ser, Thr, Val or Trp
  MOD_RES (5)...(5): Xaa = Ala, Asp, Glu, Phe, Gly, His, Ile, Lys, Leu, Met, Asn, Pro, Gln, Arg, Ser, Thr or Val
  MOD_RES (6)...(6): Xaa = Ala, Asp, Glu, Phe, Gly, His, Ile, Lys, Leu, Asn, Pro, Gln, Arg, Ser, Val or Tyr
  MOD_RES (7)...(7): Xaa = Ala, Asp, Glu, Gly, Ile, Lys, Leu, Met, Asn, Pro, Gln, Arg, Ser, Thr, Val or Tyr
  MOD_RES (9)...(9): Xaa = Ala, Asp, Glu, Gly, His, Lys, Asn, Pro, Gln, Ser, Thr or Val
  MOD_RES (10)...(10): Xaa = Phe, Gly, His, Leu, Asn, Gln, Ser, Thr or Tyr
  MOD_RES (11)...(11): Xaa = Ala, Asp, Glu, Phe, Gly, His, Ile, Lys, Leu, Asn, Gln, Arg, Ser, Thr, Val or Tyr
  MOD_RES (13)...(13): Xaa = Ala, Asp, Glu, Phe, Gly, His, Ile, Lys, Leu, Met, Asn, Gln, Arg, Ser, Thr, Val, Trp or Tyr
  MOD_RES (14)...(14): Xaa = Ala, Asp, Glu, Lys, Leu, Asn, Pro, Gln, Arg, Ser, Thr or Val
  MOD_RES (15)...(15): Xaa = Ala, Cys, Asp, Glu, Phe, Gly, His, Ile, Lys, Leu, Met, Asn, Pro, Gln, Arg, Ser, Thr, Val or Tyr
  MOD_RES (16)...(16): Xaa = Ala, Asp, Glu, Phe, Gly, His, Ile, Lys, Leu, Met, Asn, Pro, Gln, Arg, Ser, Thr, Val, Trp or Tyr
  MOD_RES (17)...(17): Xaa = Ala, Asp, Glu, Phe, Gly, His, Ile, Lys, Leu, Asn, Pro, Gln, Arg, Ser, Thr, Val or Trp
  MOD_RES (18)...(18): Xaa = Ala, Asp, Glu, Gly, His, Lys, Leu, Met, Asn, Gln, Arg, Ser, Thr, Val, Trp or Tyr
  MOD_RES (19)...(19): Xaa = Ala, Phe, His, Ile, Leu, Pro, Arg, Thr, Val or Tyr
  MOD_RES (20)...(20): Xaa = Ala, Asp, Glu, Phe, His, Ile, Lys, Leu, Met, Asn, Gln, Arg, Ser, Thr, Val, Trp or Tyr
  MOD_RES (22)...(22): Xaa = Ala, Asp, Glu, Phe, Gly, His, Ile, Lys, Leu, Met, Asn, Pro, Gln, Arg, Ser, Thr, Val, Trp or Tyr
  MOD_RES (24)...(24): Xaa = Ala, Asp, Glu, Phe, His, Lys, Leu, Met, Asn, Pro, Gln, Arg, Ser, Thr, Val, Trp or Tyr
  MOD_RES (25)...(25): Xaa = Ala, Asp, Glu, Phe, Gly, His, Lys, Leu, Asn, Pro, Gln, Arg, Ser, Thr, Val or Tyr
  MOD_RES (26)...(26): Xaa = Ala, Glu, Gly, His, Lys, Leu, Asn, Pro, Arg, Ser, Thr or Tyr
  MOD_RES (27)...(27): Xaa = Phe, His, Ile, Leu, Met, Arg, Thr, Trp or Tyr
  MOD_RES (28)...(28): Xaa = Ala, Asp, Glu, Phe, Gly, His, Ile, Lys, Leu, Met, Asn, Gln, Arg, Ser, Thr, Val or Tyr
  MOD_RES (29)...(29): Xaa = Asp, Gly or Ser
  MOD_RES (30)...(30): Xaa = Ala, Asp, Glu, Phe, His, Ile, Lys, Leu, Asn, Pro, Gln, Arg, Ser, Thr, Val or Tyr
  MOD_RES (31)...(31): Xaa = Ala, Asp, Glu, Phe, His, Ile, Lys, Leu, Met, Asn, Gln, Arg, Ser, Thr or Tyr
CXXXXXXCXXXCXXXXXXXXCXCXXXXXXXXC

SEQ ID NO: 244 - protein, 33 aa, Artificial Sequence
  EGF domain monomer sequence
  MOD_RES (2)...(2): Xaa = Ala, Asp, Glu, Phe, Gly, Ile, Lys, Leu, Met, Asn, Pro, Gln, Arg, Ser, Thr, Val or Tyr
  MOD_RES (3)...(3): Xaa = Ala, Asp, Glu, Phe, Gly, His, Ile, Lys, Leu, Met, Asn, Pro, Gln, Arg, Ser, Thr, Val or Tyr
  MOD_RES (4)...(4): Xaa = Ala, Asp, Glu, Phe, Gly, His, Ile, Lys, Leu, Met, Asn, Pro, Gln, Arg, Ser, Thr, Val or Trp
  MOD_RES (5)...(5): Xaa = Ala, Asp, Glu, Phe, Gly, His, Ile, Lys, Leu, Met, Asn, Pro, Gln, Arg, Ser, Thr or Val
  MOD_RES (6)...(6): Xaa = Ala, Asp, Glu, Phe, Gly, His, Ile, Lys, Leu, Asn, Pro, Gln, Arg, Ser, Val or Tyr
  MOD_RES (7)...(7): Xaa = Ala, Asp, Glu, Gly, Ile, Lys, Leu, Met, Asn, Pro, Gln, Arg, Ser, Thr, Val or Tyr
  MOD_RES (9)...(9): Xaa = Ala, Asp, Glu, Gly, His, Lys, Asn, Pro, Gln, Ser, Thr or Val
  MOD_RES (10)...(10): Xaa = Phe, Gly, His, Leu, Asn, Gln, Ser, Thr or Tyr
  MOD_RES (11)...(11): Xaa = Ala, Asp, Glu, Phe, Gly, His, Ile, Lys, Leu, Asn, Gln, Arg, Ser, Thr, Val or Tyr
  MOD_RES (13)...(13): Xaa = Ala, Asp, Glu, Phe, Gly, His, Ile, Lys, Leu, Met, Asn, Gln, Arg, Ser, Thr, Val, Trp or Tyr
  MOD_RES (14)...(14): Xaa = Ala, Asp, Glu, Lys, Leu, Asn, Pro, Gln, Arg, Ser, Thr or Val
  MOD_RES (15)...(15): Xaa = Ala, Cys, Asp, Glu, Phe, Gly, His, Ile, Lys, Leu, Met, Asn, Pro, Gln, Arg, Ser, Thr, Val or Tyr
  MOD_RES (16)...(16): Xaa = Ala, Asp, Glu, Phe, Gly, His, Ile, Lys, Leu, Met, Asn, Pro, Gln, Arg, Ser, Thr, Val, Trp or Tyr
  MOD_RES (17)...(17): Xaa = Ala, Asp, Glu, Phe, Gly, His, Ile, Lys, Leu, Asn, Pro, Gln, Arg, Ser, Thr, Val or Trp
  MOD_RES (18)...(18): Xaa = Ala, Asp, Glu, Gly, His, Lys, Leu, Met, Asn, Gln, Arg, Ser, Thr, Val, Trp or Tyr
  MOD_RES (19)...(19): Xaa = Ala, Phe, His, Ile, Leu, Pro, Arg, Thr, Val or Tyr
  MOD_RES (20)...(20): Xaa = Ala, Asp, Glu, Phe, His, Ile, Lys, Leu, Met, Asn, Gln, Arg, Ser, Thr, Val, Trp or Tyr
  MOD_RES (22)...(22): Xaa = Ala, Asp, Glu, Phe, Gly, His, Ile, Lys, Leu, Met, Asn, Pro, Gln, Arg, Ser, Thr, Val, Trp or Tyr
  MOD_RES (24)...(24): Xaa = Ala, Asp, Glu, Phe, Gly, His, Ile, Lys, Leu, Asn, Pro, Gln, Arg, Ser, Thr, Val or Tyr
  MOD_RES (25)...(25): Xaa = Ala, Asp, Glu, Phe, His, Ile, Lys, Leu, Met, Asn, Pro, Gln, Arg, Ser, Thr or Val
  MOD_RES (26)...(26): Xaa = Asp, Glu, Gly, Asn, Pro or Ser
  MOD_RES (27)...(27): Xaa = Ala, Asp, Glu, Phe, His, Leu, Met, Gln, Arg, Ser, Thr, Trp or Tyr
  MOD_RES (28)...(28): Xaa = Ala, Asp, Glu, Phe, Gly, His, Ile, Lys, Leu, Met, Asn, Gln, Arg, Ser, Thr, Val or Tyr
  MOD_RES (29)...(29): Xaa = Ala, Phe, Gly, Ile, Lys, Leu, Met, Pro, Gln, Arg, Ser, Thr, Val, Trp or Tyr
  MOD_RES (30)...(30): Xaa = Ala, Asp, Glu, Phe, Gly, His, Lys, Leu, Met, Asn, Pro, Gln, Arg, Ser, Thr, Val or Trp
  MOD_RES (31)...(31): Xaa = Ala, Asp, Glu, Gly, Ile, Lys, Leu, Met, Asn, Pro, Gln, Arg, Ser, Thr, Val or Tyr
  MOD_RES (32)...(32): Xaa = Ala, Asp, Glu, Phe, Gly, His, Ile, Lys, Leu, Met, Asn, Gln, Ser, Thr or Val
CXXXXXXCXXXCXXXXXXXXCXCXXXXXXXXXC

SEQ ID NO: 245 - protein, 34 aa, Artificial Sequence
  EGF domain monomer sequence
  MOD_RES (2)...(2): Xaa = Ala, Asp, Glu, Phe, Gly, Ile, Lys, Leu, Met, Asn, Pro, Gln, Arg, Ser, Thr, Val or Tyr
  MOD_RES (3)...(3): Xaa = Ala, Asp, Glu, Phe, Gly, His, Ile, Lys, Leu, Met, Asn, Pro, Gln, Arg, Ser, Thr, Val or Tyr
  MOD_RES (4)...(4): Xaa = Ala, Asp, Glu, Phe, Gly, His, Ile, Lys, Leu, Met, Asn, Pro, Gln, Arg, Ser, Thr, Val or Trp
  MOD_RES (5)...(5): Xaa = Ala, Asp, Glu, Phe, Gly, His, Ile, Lys, Leu, Met, Asn, Pro, Gln, Arg, Ser, Thr or Val
  MOD_RES (6)...(6): Xaa = Ala, Asp, Glu, Phe, Gly, His, Ile, Lys, Leu, Asn, Pro, Gln, Arg, Ser, Val or Tyr
  MOD_RES (7)...(7): Xaa = Ala, Asp, Glu, Gly, Ile, Lys, Leu, Met, Asn, Pro, Gln, Arg, Ser, Thr, Val or Tyr
  MOD_RES (9)...(9): Xaa = Ala, Asp, Glu, Gly, His, Lys, Asn, Pro, Gln, Ser, Thr or Val
  MOD_RES (10)...(10): Xaa = Phe, Gly, His, Leu, Asn, Gln, Ser, Thr or Tyr
  MOD_RES (11)...(11): Xaa = Ala, Asp, Glu, Phe, Gly, His, Ile, Lys, Leu, Asn, Gln, Arg, Ser, Thr, Val or Tyr
  MOD_RES (13)...(13): Xaa = Ala, Asp, Glu, Phe, Gly, His, Ile, Lys, Leu, Met, Asn, Gln, Arg, Ser, Thr, Val, Trp or Tyr
  MOD_RES (14)...(14): Xaa = Ala, Asp, Glu, Lys, Leu, Asn, Pro, Gln, Arg, Ser, Thr or Val
  MOD_RES (15)...(15): Xaa = Ala, Cys, Asp, Glu, Phe, Gly, His, Ile, Lys, Leu, Met, Asn, Pro, Gln, Arg, Ser, Thr, Val or Tyr
  MOD_RES (16)...(16): Xaa = Ala, Asp, Glu, Phe, Gly, His, Ile, Lys, Leu, Met, Asn, Pro, Gln, Arg, Ser, Thr, Val, Trp or Tyr
  MOD_RES (17)...(17): Xaa = Ala, Asp, Glu, Phe, Gly, His, Ile, Lys, Leu, Asn, Pro, Gln, Arg, Ser, Thr, Val or Trp
  MOD_RES (18)...(18): Xaa = Ala, Asp, Glu, Gly, His, Lys, Leu, Met, Asn, Gln, Arg, Ser, Thr, Val, Trp or Tyr
  MOD_RES (19)...(19): Xaa = Ala, Phe, His, Ile, Leu, Pro, Arg, Thr, Val or Tyr
  MOD_RES (20)...(20): Xaa = Ala, Asp, Glu, Phe, His, Ile, Lys, Leu, Met, Asn, Gln, Arg, Ser, Thr, Val, Trp or Tyr
  MOD_RES (22)...(22): Xaa = Ala, Asp, Glu, Phe, Gly, His, Ile, Lys, Leu, Met, Asn, Pro, Gln, Arg, Ser, Thr, Val, Trp or Tyr
  MOD_RES (24)...(24): Xaa = Ala, Asp, Glu, Phe, Gly, His, Ile, Lys, Leu, Asn, Pro, Gln, Arg, Ser, Thr, Val or Tyr
  MOD_RES (25)...(25): Xaa = Ala, Asp, Glu, Phe, His, Ile, Lys, Leu, Met, Asn, Pro, Gln, Arg, Ser, Thr or Val
  MOD_RES (26)...(26): Xaa = Asp, Glu, Gly, Asn, Pro or Ser
  MOD_RES (27)...(27): Xaa = Ala, Asp, Glu, Phe, His, Leu, Met, Gln, Arg, Ser, Thr, Trp or Tyr
  MOD_RES (28)...(28): Xaa = Ala, Asp, Glu, Phe, Gly, His, Ile, Lys, Leu, Met, Asn, Gln, Arg, Ser, Thr, Val or Tyr
  MOD_RES (29)...(29): Xaa = Ala, Phe, Gly, Ile, Lys, Leu, Met, Pro, Gln, Arg, Ser, Thr, Val, Trp or Tyr
  MOD_RES (30)...(30): Xaa = Ala, Asp, Glu, Phe, Gly, His, Lys, Leu, Met, Asn, Pro, Gln, Arg, Ser, Thr, Val or Trp
  MOD_RES (31)...(31): Xaa = Ala, Asp, Glu, Gly, Ile, Lys, Leu, Met, Asn, Pro, Gln, Arg, Ser, Thr, Val or Tyr
  MOD_RES (32)...(32): Xaa = Ala, Asp, Glu, Phe, Gly, His, Ile, Lys, Leu, Met, Asn, Gln, Ser, Thr or Val
  MOD_RES (33)...(33): Xaa = Glu, Phe, Gly, His, Ile, Lys, Leu, Met, Asn, Pro, Gln, Arg, Ser, Thr or Trp
CXXXXXXCXXXCXXXXXXXXCXCXXXXXXXXXXC

SEQ ID NO: 246 - protein, 35 aa, Artificial Sequence
  EGF domain monomer sequence
  MOD_RES (2)...(2): Xaa = Ala, Asp, Glu, Phe, Gly, Ile, Lys, Leu, Met, Asn, Pro, Gln, Arg, Ser, Thr, Val or Tyr
  MOD_RES (3)...(3): Xaa = Ala, Asp, Glu, Phe, Gly, His, Ile, Lys, Leu, Met, Asn, Pro, Gln, Arg, Ser, Thr, Val or Tyr
  MOD_RES (4)...(4): Xaa = Ala, Asp, Glu, Phe, Gly, His, Ile, Lys, Leu, Met, Asn, Pro, Gln, Arg, Ser, Thr, Val or Trp
  MOD_RES (5)...(5): Xaa = Ala, Asp, Glu, Phe, Gly, His, Ile, Lys, Leu, Met, Asn, Pro, Gln, Arg, Ser, Thr or Val
  MOD_RES (6)...(6): Xaa = Ala, Asp, Glu, Phe, Gly, His, Ile, Lys, Leu, Asn, Pro, Gln, Arg, Ser, Val or Tyr
  MOD_RES (7)...(7): Xaa = Ala, Asp, Glu, Gly, Ile, Lys, Leu, Met, Asn, Pro, Gln, Arg, Ser, Thr, Val or Tyr
  MOD_RES (9)...(9): Xaa = Ala, Asp, Glu, Gly, His, Lys, Asn, Pro, Gln, Ser, Thr or Val
  MOD_RES (10)...(10): Xaa = Phe, Gly, His, Leu, Asn, Gln, Ser, Thr or Tyr
  MOD_RES (11)...(11): Xaa = Ala, Asp, Glu, Phe, Gly, His, Ile, Lys, Leu, Asn, Gln, Arg, Ser, Thr, Val or Tyr
  MOD_RES (13)...(13): Xaa = Ala, Asp, Glu, Phe, Gly, His, Ile, Lys, Leu, Met, Asn, Gln, Arg, Ser, Thr, Val, Trp or Tyr
  MOD_RES (14)...(14): Xaa = Ala, Asp, Glu, Lys, Leu, Asn, Pro, Gln, Arg, Ser, Thr or Val
  MOD_RES (15)...(15): Xaa = Ala, Cys, Asp, Glu, Phe, Gly, His, Ile, Lys, Leu, Met, Asn, Pro, Gln, Arg, Ser, Thr, Val or Tyr
  MOD_RES (16)...(16): Xaa = Ala, Asp, Glu, Phe, Gly, His, Ile, Lys, Leu, Met, Asn, Pro, Gln, Arg, Ser, Thr, Val, Trp or Tyr
  MOD_RES (17)...(17): Xaa = Ala, Asp, Glu, Phe, Gly, His, Ile, Lys, Leu, Asn, Pro, Gln, Arg, Ser, Thr, Val or Trp
  MOD_RES (18)...(18): Xaa = Ala, Asp, Glu, Gly, His, Lys, Leu, Met, Asn, Gln, Arg, Ser, Thr, Val, Trp or Tyr
  MOD_RES (19)...(19): Xaa = Ala, Phe, His, Ile, Leu, Pro, Arg, Thr, Val or Tyr
  MOD_RES (20)...(20): Xaa = Ala, Asp, Glu, Phe, His, Ile, Lys, Leu, Met, Asn, Gln, Arg, Ser, Thr, Val, Trp or Tyr
  MOD_RES (22)...(22): Xaa = Ala, Asp, Glu, Phe, Gly, His, Ile, Lys, Leu, Met, Asn, Pro, Gln, Arg, Ser, Thr, Val, Trp or Tyr
  MOD_RES (24)...(24): Xaa = Ala, Asp, Glu, Phe, Gly, His, Ile, Lys, Leu, Asn, Pro, Gln, Arg, Ser, Thr, Val or Tyr
  MOD_RES (25)...(25): Xaa = Ala, Asp, Glu, Phe, His, Ile, Lys, Leu, Met, Asn, Pro, Gln, Arg, Ser, Thr or Val
  MOD_RES (26)...(26): Xaa = Asp, Glu, Gly, Asn, Pro or Ser
  MOD_RES (27)...(27): Xaa = Ala, Asp, Glu, Phe, His, Leu, Met, Gln, Arg, Ser, Thr, Trp or Tyr
  MOD_RES (28)...(28): Xaa = Ala, Asp, Glu, Phe, Gly, His, Ile, Lys, Leu, Met, Asn, Gln, Arg, Ser, Thr, Val or Tyr
  MOD_RES (29)...(29): Xaa = Ala, Phe, Gly, Ile, Lys, Leu, Met, Pro, Gln, Arg, Ser, Thr, Val, Trp or Tyr
  MOD_RES (30)...(30): Xaa = Ala, Asp, Glu, Phe, Gly, His, Lys, Leu, Met, Asn, Pro, Gln, Arg, Ser, Thr, Val or Trp
  MOD_RES (31)...(31): Xaa = Ala, Asp, Glu, Gly, Ile, Lys, Leu, Met, Asn, Pro, Gln, Arg, Ser, Thr, Val or Tyr
  MOD_RES (32)...(32): Xaa = Ala, Asp, Glu, Phe, Gly, His, Ile, Lys, Leu, Met, Asn, Gln, Ser, Thr or Val
  MOD_RES (33)...(33): Xaa = Glu, Phe, Gly, His, Ile, Lys, Leu, Met, Asn, Pro, Gln, Arg, Ser, Thr or Trp
  MOD_RES (34)...(34): Xaa = Ala, Asp, Glu, Phe, Gly, His, Lys, Leu, Met, Asn, Pro, Gln, Arg, Ser, Thr, Val or Tyr
CXXXXXXCXXXCXXXXXXXXCXCXXXXXXXXXXXC

SEQ ID NO: 247 - protein, 36 aa, Artificial Sequence
  EGF domain monomer sequence
  MOD_RES (2)...(2): Xaa = Ala, Asp, Glu, Phe, Gly, Ile, Lys, Leu, Met, Asn, Pro, Gln, Arg, Ser, Thr, Val or Tyr
  MOD_RES (3)...(3): Xaa = Ala, Asp, Glu, Phe, Gly, His, Ile, Lys, Leu, Met, Asn, Pro, Gln, Arg, Ser, Thr, Val or Tyr
  MOD_RES (4)...(4): Xaa = Ala, Asp, Glu, Phe, Gly, His, Ile, Lys, Leu, Met, Asn, Pro, Gln, Arg, Ser, Thr, Val or Trp
  MOD_RES (5)...(5): Xaa = Ala, Asp, Glu, Phe, Gly, His, Ile, Lys, Leu, Met, Asn, Pro, Gln, Arg, Ser, Thr or Val
  MOD_RES (6)...(6): Xaa = Ala, Asp, Glu, Phe, Gly, His, Ile, Lys, Leu, Asn, Pro, Gln, Arg, Ser, Val or Tyr
  MOD_RES (7)...(7): Xaa = Ala, Asp, Glu, Gly, Ile, Lys, Leu, Met, Asn, Pro, Gln, Arg, Ser, Thr, Val or Tyr
  MOD_RES (9)...(9): Xaa = Ala, Asp, Glu, Gly, His, Lys, Asn, Pro, Gln, Ser, Thr or Val
  MOD_RES (10)...(10): Xaa = Phe, Gly, His, Leu, Asn, Gln, Ser, Thr or Tyr
  MOD_RES (11)...(11): Xaa = Ala, Asp, Glu, Phe, Gly, His, Ile, Lys, Leu, Asn, Gln, Arg, Ser, Thr, Val or Tyr
  MOD_RES (13)...(13): Xaa = Ala, Asp, Glu, Phe, Gly, His, Ile, Lys, Leu, Met, Asn, Gln, Arg, Ser, Thr, Val, Trp or Tyr
  MOD_RES (14)...(14): Xaa = Ala, Asp, Glu, Lys, Leu, Asn, Pro, Gln, Arg, Ser, Thr or Val
  MOD_RES (15)...(15): Xaa = Ala, Cys, Asp, Glu, Phe, Gly, His, Ile, Lys, Leu, Met, Asn, Pro, Gln, Arg, Ser, Thr, Val or Tyr
  MOD_RES (16)...(16): Xaa = Ala, Asp, Glu, Phe, Gly, His, Ile, Lys, Leu, Met, Asn, Pro, Gln, Arg, Ser, Thr, Val, Trp or Tyr
  MOD_RES (17)...(17): Xaa = Ala, Asp, Glu, Phe, Gly, His, Ile, Lys, Leu, Asn, Pro, Gln, Arg, Ser, Thr, Val or Trp
  MOD_RES (18)...(18): Xaa = Ala, Asp, Glu, Gly, His, Lys, Leu, Met, Asn, Gln, Arg, Ser, Thr, Val, Trp or Tyr
  MOD_RES (19)...(19): Xaa = Ala, Phe, His, Ile, Leu, Pro, Arg, Thr, Val or Tyr
  MOD_RES (20)...(20): Xaa = Ala, Asp, Glu, Phe, His, Ile, Lys, Leu, Met, Asn, Gln, Arg, Ser, Thr, Val, Trp or Tyr
  MOD_RES (22)...(22): Xaa = Ala, Asp, Glu, Phe, Gly, His, Ile, Lys, Leu, Met, Asn, Pro, Gln, Arg, Ser, Thr, Val, Trp or Tyr
  MOD_RES (24)...(24): Xaa = Ala, Asp, Glu, Phe, Gly, His, Ile, Lys, Leu, Asn, Pro, Gln, Arg, Ser, Thr, Val or Tyr
  MOD_RES (25)...(25): Xaa = Ala, Asp, Glu, Phe, His, Ile, Lys, Leu, Met, Asn, Pro, Gln, Arg, Ser, Thr or Val
  MOD_RES (26)...(26): Xaa = Asp, Glu, Gly, Asn, Pro or Ser
  MOD_RES (27)...(27): Xaa = Ala, Asp, Glu, Phe, His, Leu, Met, Gln, Arg, Ser, Thr, Trp or Tyr
  MOD_RES (28)...(28): Xaa = Ala, Asp, Glu, Phe, Gly, His, Ile, Lys, Leu, Met, Asn, Gln, Arg, Ser, Thr, Val or Tyr
  MOD_RES (29)...(29): Xaa = Ala, Phe, Gly, Ile, Lys, Leu, Met, Pro, Gln, Arg, Ser, Thr, Val, Trp or Tyr
  MOD_RES (30)...(30): Xaa = Ala, Asp, Glu, Phe, Gly, His, Lys, Leu, Met, Asn, Pro, Gln, Arg, Ser, Thr, Val or Trp
  MOD_RES (31)...(31): Xaa = Ala, Asp, Glu, Gly, Ile, Lys, Leu, Met, Asn, Pro, Gln, Arg, Ser, Thr, Val or Tyr
  MOD_RES (32)...(32): Xaa = Ala, Asp, Glu, Phe, Gly, His, Ile, Lys, Leu, Met, Asn, Gln, Ser, Thr or Val
  MOD_RES (33)...(33): Xaa = Glu, Phe, Gly, His, Ile, Lys, Leu, Met, Asn, Pro, Gln, Arg, Ser, Thr or Trp
  MOD_RES (34)...(34): Xaa = Ala, Asp, Glu, Phe, Gly, His, Lys, Leu, Met, Asn, Pro, Gln, Arg, Ser, Thr, Val or Tyr
  MOD_RES (35)...(35): Xaa = Ala, Asp, Glu, Phe, Gly, His, Ile, Lys, Met, Asn, Gln, Arg, Ser, Thr, Val or Tyr
CXXXXXXCXXXCXXXXXXXXCXCXXXXXXXXXXXXC

SEQ ID NO: 248 - protein, 31 aa, Artificial Sequence
  EGF domain monomer sequence
  MOD_RES (2)...(2): Xaa = Ala, Asp, Glu, Phe, Gly, His, Ile, Lys, Leu, Asn, Pro, Gln, Arg, Ser, Thr, Val or Trp
  MOD_RES (3)...(3): Xaa = Ala, Asp, Glu, Gly, His, Lys, Leu, Met, Asn, Pro, Arg, Ser, Thr or Tyr
  MOD_RES (4)...(4): Xaa = Ala, Asp, Glu, Gly, His, Lys, Leu, Met, Asn, Pro, Gln, Arg, Ser, Thr, Val or Trp
  MOD_RES (5)...(5): Xaa = Ala, Glu, Gly, Met, Asn, Pro, Gln, Arg, Ser, Thr or Tyr
  MOD_RES (7)...(7): Xaa = Ala, Asp, Glu, Phe, Gly, His, Ile, Lys, Leu, Met, Asn, Pro, Gln, Arg, Ser, Thr or Val
  MOD_RES (8)...(8): Xaa = Ala, Asp, Glu, Phe, Gly, His, Lys, Leu, Asn, Pro, Gln, Arg, Ser, Thr or Tyr
  MOD_RES (9)...(9): Xaa = Ala, Gly or Thr
  MOD_RES (10)...(10): Xaa = Ala, Asp, Glu, Phe, His, Ile, Lys, Leu, Met, Asn, Gln, Arg, Ser, Thr or Val
  MOD_RES (12)...(12): Xaa = Ala, Asp, Glu, Phe, Gly, His, Ile, Lys, Leu, Met, Asn, Gln, Arg, Ser, Thr, Val, Trp or Tyr
  MOD_RES (13)...(13): Xaa = Ala, Asp, Glu, Lys, Leu, Asn, Pro, Gln, Arg, Ser, Thr or Val
  MOD_RES (14)...(14): Xaa = Ala, Cys, Asp, Glu, Phe, Gly, His, Ile, Lys, Leu, Met, Asn, Pro, Gln, Arg, Ser, Thr, Val or Tyr
  MOD_RES (15)...(15): Xaa = Ala, Asp, Glu, Phe, Gly, His, Ile, Lys, Leu, Met, Asn, Pro, Gln, Arg, Ser, Thr, Val, Trp or Tyr
  MOD_RES (16)...(16): Xaa = Ala, Asp, Glu, Phe, Gly, His, Ile, Lys, Leu, Asn, Pro, Gln, Arg, Ser, Thr, Val or Trp
  MOD_RES (17)...(17): Xaa = Ala, Asp, Glu, Gly, His, Lys, Leu, Met, Asn, Gln, Arg, Ser, Thr, Val, Trp or Tyr
  MOD_RES (18)...(18): Xaa = Ala, Phe, His, Ile, Leu, Pro, Arg, Thr, Val or Tyr
  MOD_RES (19)...(19): Xaa = Ala, Asp, Glu, Phe, His, Ile, Lys, Leu, Met, Asn, Gln, Arg, Ser, Thr, Val, Trp or Tyr
  MOD_RES (21)...(21): Xaa = Ala, Asp, Glu, Phe, Gly, His, Ile, Lys, Leu, Met, Asn, Pro, Gln, Arg, Ser, Thr, Val, Trp or Tyr
  MOD_RES (23)...(23): Xaa = Ala, Asp, Glu, Phe, His, Lys, Leu, Met, Asn, Pro, Gln, Arg, Ser, Thr, Val, Trp or Tyr
  MOD_RES (24)...(24): Xaa = Ala, Asp, Glu, Phe, Gly, His, Lys, Leu, Asn, Pro, Gln, Arg, Ser, Thr, Val or Tyr
  MOD_RES (25)...(25): Xaa = Ala, Glu, Gly, His, Lys, Leu, Asn, Pro, Arg, Ser, Thr or Tyr
  MOD_RES (26)...(26): Xaa = Phe, His, Ile, Leu, Met, Arg, Thr, Trp or Tyr
  MOD_RES (27)...(27): Xaa = Ala, Asp, Glu, Phe, Gly, His, Ile, Lys, Leu, Met, Asn, Gln, Arg, Ser, Thr, Val or Tyr
  MOD_RES (28)...(28): Xaa = Asp, Gly or Ser
  MOD_RES (29)...(29): Xaa = Ala, Asp, Glu, Phe, His, Ile, Lys, Leu, Asn, Pro, Gln, Arg, Ser, Thr, Val or Tyr
  MOD_RES (30)...(30): Xaa = Ala, Asp, Glu, Phe, His, Ile, Lys, Leu, Met, Asn, Gln, Arg, Ser, Thr or Tyr
CXXXXCXXXXCXXXXXXXXCXCXXXXXXXXC

SEQ ID NO: 249 - protein, 32 aa, Artificial Sequence
  EGF domain monomer sequence
  MOD_RES (2)...(2): Xaa = Ala, Asp, Glu, Phe, Gly, His, Ile, Lys, Leu, Asn, Pro, Gln, Arg, Ser, Thr, Val or Trp
  MOD_RES (3)...(3): Xaa = Ala, Asp, Glu, Gly, His, Lys, Leu, Met, Asn, Pro, Arg, Ser, Thr or Tyr
  MOD_RES (4)...(4): Xaa = Ala, Asp, Glu, Gly, His, Lys, Leu, Met, Asn, Pro, Gln, Arg, Ser, Thr, Val or Trp
  MOD_RES (5)...(5): Xaa = Ala, Glu, Gly, Met, Asn, Pro, Gln, Arg, Ser, Thr or Tyr
  MOD_RES (7)...(7): Xaa = Ala, Asp, Glu, Phe, Gly, His, Ile, Lys, Leu, Met, Asn, Pro, Gln, Arg, Ser, Thr or Val
  MOD_RES (8)...(8): Xaa = Ala, Asp, Glu, Phe, Gly, His, Lys, Leu, Asn, Pro, Gln, Arg, Ser, Thr or Tyr
  MOD_RES (9)...(9): Xaa = Ala, Gly or Thr
  MOD_RES (10)...(10): Xaa = Ala, Asp, Glu, Phe, His, Ile, Lys, Leu, Met, Asn, Gln, Arg, Ser, Thr or Val
  MOD_RES (12)...(12): Xaa = Ala, Asp, Glu, Phe, Gly, His, Ile, Lys, Leu, Met, Asn, Gln, Arg, Ser, Thr, Val, Trp or Tyr
  MOD_RES (13)...(13): Xaa = Ala, Asp, Glu, Lys, Leu, Asn, Pro, Gln, Arg, Ser, Thr or Val
  MOD_RES (14)...(14): Xaa = Ala, Cys, Asp, Glu, Phe, Gly, His, Ile, Lys, Leu, Met, Asn, Pro, Gln, Arg, Ser, Thr, Val or Tyr
  MOD_RES (15)...(15): Xaa = Ala, Asp, Glu, Phe, Gly, His, Ile, Lys, Leu, Met, Asn, Pro, Gln, Arg, Ser, Thr, Val, Trp or Tyr
  MOD_RES (16)...(16): Xaa = Ala, Asp, Glu, Phe, Gly, His, Ile, Lys, Leu, Asn, Pro, Gln, Arg, Ser, Thr, Val or Trp
  MOD_RES (17)...(17): Xaa = Ala, Asp, Glu, Gly, His, Lys, Leu, Met, Asn, Gln, Arg, Ser, Thr, Val, Trp or Tyr
  MOD_RES (18)...(18): Xaa = Ala, Phe, His, Ile, Leu, Pro, Arg, Thr, Val or Tyr
  MOD_RES (19)...(19): Xaa = Ala, Asp, Glu, Phe, His, Ile, Lys, Leu, Met, Asn, Gln, Arg, Ser, Thr, Val, Trp or Tyr
  MOD_RES (21)...(21): Xaa = Ala, Asp, Glu, Phe, Gly, His, Ile, Lys, Leu, Met, Asn, Pro, Gln, Arg, Ser, Thr, Val, Trp or Tyr
  MOD_RES (23)...(23): Xaa = Ala, Asp, Glu, Phe, Gly, His, Ile, Lys, Leu, Asn, Pro, Gln, Arg, Ser, Thr, Val or Tyr
  MOD_RES (24)...(24): Xaa = Ala, Asp, Glu, Phe, His, Ile, Lys, Leu, Met, Asn, Pro, Gln, Arg, Ser, Thr or Val
  MOD_RES (25)...(25): Xaa = Asp, Glu, Gly, Asn, Pro or Ser
  MOD_RES (26)...(26): Xaa = Ala, Asp, Glu, Phe, His, Leu, Met, Gln, Arg, Ser, Thr, Trp or Tyr
  MOD_RES (27)...(27): Xaa = Ala, Asp, Glu, Phe, Gly, His, Ile, Lys, Leu, Met, Asn, Gln, Arg, Ser, Thr, Val or Tyr
  MOD_RES (28)...(28): Xaa = Ala, Phe, Gly, Ile, Lys, Leu, Met, Pro, Gln, Arg, Ser, Thr, Val, Trp or Tyr
  MOD_RES (29)...(29): Xaa = Ala, Asp, Glu, Phe, Gly, His, Lys, Leu, Met, Asn, Pro, Gln, Arg, Ser, Thr, Val or Trp
  MOD_RES (30)...(30): Xaa = Ala, Asp, Glu, Gly, Ile, Lys, Leu, Met, Asn, Pro, Gln, Arg, Ser, Thr, Val or Tyr
  MOD_RES (31)...(31): Xaa = Ala, Asp, Glu, Phe, Gly, His, Ile, Lys, Leu, Met, Asn, Gln, Ser, Thr or Val
CXXXXCXXXXCXXXXXXXXCXCXXXXXXXXXC

SEQ ID NO: 250 - protein, 33 aa, Artificial Sequence
  EGF domain monomer sequence
  MOD_RES (2)...(2): Xaa = Ala, Asp, Glu, Phe, Gly, His, Ile, Lys, Leu, Asn, Pro, Gln, Arg, Ser, Thr, Val or Trp
  MOD_RES (3)...(3): Xaa = Ala, Asp, Glu, Gly, His, Lys, Leu, Met, Asn, Pro, Arg, Ser, Thr or Tyr
  MOD_RES (4)...(4): Xaa = Ala, Asp, Glu, Gly, His, Lys, Leu, Met, Asn, Pro, Gln, Arg, Ser, Thr, Val or Trp
  MOD_RES (5)...(5): Xaa = Ala, Glu, Gly, Met, Asn, Pro, Gln, Arg, Ser, Thr or Tyr
  MOD_RES (7)...(7): Xaa = Ala, Asp, Glu, Phe, Gly, His, Ile, Lys, Leu, Met, Asn, Pro, Gln, Arg, Ser, Thr or Val
  MOD_RES (8)...(8): Xaa = Ala, Asp, Glu, Phe, Gly, His, Lys, Leu, Asn, Pro, Gln, Arg, Ser, Thr or Tyr
  MOD_RES (9)...(9): Xaa = Ala, Gly or Thr
  MOD_RES (10)...(10): Xaa = Ala, Asp, Glu, Phe, His, Ile, Lys, Leu, Met, Asn, Gln, Arg, Ser, Thr or Val
  MOD_RES (12)...(12): Xaa = Ala, Asp, Glu, Phe, Gly, His, Ile, Lys, Leu, Met, Asn, Gln, Arg, Ser, Thr, Val, Trp or Tyr
  MOD_RES (13)...(13): Xaa = Ala, Asp, Glu, Lys, Leu, Asn, Pro, Gln, Arg, Ser, Thr or Val
  MOD_RES (14)...(14): Xaa = Ala, Cys, Asp, Glu, Phe, Gly, His, Ile, Lys, Leu, Met, Asn, Pro, Gln, Arg, Ser, Thr, Val or Tyr
  MOD_RES (15)...(15): Xaa = Ala, Asp, Glu, Phe, Gly, His, Ile, Lys, Leu, Met, Asn, Pro, Gln, Arg, Ser, Thr, Val, Trp or Tyr
  MOD_RES (16)...(16): Xaa = Ala, Asp, Glu, Phe, Gly, His, Ile, Lys, Leu, Asn, Pro, Gln, Arg, Ser, Thr, Val or Trp
  MOD_RES (17)...(17): Xaa = Ala, Asp, Glu, Gly, His, Lys, Leu, Met, Asn, Gln, Arg, Ser, Thr, Val, Trp or Tyr
  MOD_RES (18)...(18): Xaa = Ala, Phe, His, Ile, Leu, Pro, Arg, Thr, Val or Tyr
  MOD_RES (19)...(19): Xaa = Ala, Asp, Glu, Phe, His, Ile, Lys, Leu, Met, Asn, Gln, Arg, Ser, Thr, Val, Trp or Tyr
  MOD_RES (21)...(21): Xaa = Ala, Asp, Glu, Phe, Gly, His, Ile, Lys, Leu, Met, Asn, Pro, Gln, Arg, Ser, Thr, Val, Trp or Tyr
  MOD_RES (23)...(23): Xaa = Ala, Asp, Glu, Phe, Gly, His, Ile, Lys, Leu, Asn, Pro, Gln, Arg, Ser, Thr, Val or Tyr
  MOD_RES (24)...(24): Xaa = Ala, Asp, Glu, Phe, His, Ile, Lys, Leu, Met, Asn, Pro, Gln, Arg, Ser, Thr or Val
  MOD_RES (25)...(25): Xaa = Asp, Glu, Gly, Asn, Pro or Ser
  MOD_RES (26)...(26): Xaa = Ala, Asp, Glu, Phe, His, Leu, Met, Gln, Arg, Ser, Thr, Trp or Tyr
  MOD_RES (27)...(27): Xaa = Ala, Asp, Glu, Phe, Gly, His, Ile, Lys, Leu, Met, Asn, Gln, Arg, Ser, Thr, Val or Tyr
  MOD_RES (28)...(28): Xaa = Ala, Phe, Gly, Ile, Lys, Leu, Met, Pro, Gln, Arg, Ser, Thr, Val, Trp or Tyr
  MOD_RES (29)...(29): Xaa = Ala, Asp, Glu, Phe, Gly, His, Lys, Leu, Met, Asn, Pro, Gln, Arg, Ser, Thr, Val or Trp
  MOD_RES (30)...(30): Xaa = Ala, Asp, Glu, Gly, Ile, Lys, Leu, Met, Asn, Pro, Gln, Arg, Ser, Thr, Val or Tyr
  MOD_RES (31)...(31): Xaa = Ala, Asp, Glu, Phe, Gly, His, Ile, Lys, Leu, Met, Asn, Gln, Ser, Thr or Val
  MOD_RES (32)...(32): Xaa = Glu, Phe, Gly, His, Ile, Lys, Leu, Met, Asn, Pro, Gln, Arg, Ser, Thr or Trp
CXXXXCXXXXCXXXXXXXXCXCXXXXXXXXXXC

SEQ ID NO: 251 - protein, 34 aa, Artificial Sequence
  EGF domain monomer sequence
  MOD_RES (2)...(2): Xaa = Ala, Asp, Glu, Phe, Gly, His, Ile, Lys, Leu, Asn, Pro, Gln, Arg, Ser, Thr, Val or Trp
  MOD_RES (3)...(3): Xaa = Ala, Asp, Glu, Gly, His, Lys, Leu, Met, Asn, Pro, Arg, Ser, Thr or Tyr
  MOD_RES (4)...(4): Xaa = Ala, Asp, Glu, Gly, His, Lys, Leu, Met, Asn, Pro, Gln, Arg, Ser, Thr, Val or Trp
  MOD_RES (5)...(5): Xaa = Ala, Glu, Gly, Met, Asn, Pro, Gln, Arg, Ser, Thr or Tyr
  MOD_RES (7)...(7): Xaa = Ala, Asp, Glu, Phe, Gly, His, Ile, Lys, Leu, Met, Asn, Pro, Gln, Arg, Ser, Thr or Val
  MOD_RES (8)...(8): Xaa = Ala, Asp, Glu, Phe, Gly, His, Lys, Leu, Asn, Pro, Gln, Arg, Ser, Thr or Tyr
  MOD_RES (9)...(9): Xaa = Ala, Gly or Thr
  MOD_RES (10)...(10): Xaa = Ala, Asp, Glu, Phe, His, Ile, Lys, Leu, Met, Asn, Gln, Arg, Ser, Thr or Val
  MOD_RES (12)...(12): Xaa = Ala, Asp, Glu, Phe, Gly, His, Ile, Lys, Leu, Met, Asn, Gln, Arg, Ser, Thr, Val, Trp or Tyr
  MOD_RES (13)...(13): Xaa = Ala, Asp, Glu, Lys, Leu, Asn, Pro, Gln, Arg, Ser, Thr or Val
  MOD_RES (14)...(14): Xaa = Ala, Cys, Asp, Glu, Phe, Gly, His, Ile, Lys, Leu, Met, Asn, Pro, Gln, Arg, Ser, Thr, Val or Tyr
  MOD_RES (15)...(15): Xaa = Ala, Asp, Glu, Phe, Gly, His, Ile, Lys, Leu, Met, Asn, Pro, Gln, Arg, Ser, Thr, Val, Trp or Tyr
  MOD_RES (16)...(16): Xaa = Ala, Asp, Glu, Phe, Gly, His, Ile, Lys, Leu, Asn, Pro, Gln, Arg, Ser, Thr, Val or Trp
  MOD_RES (17)...(17): Xaa = Ala, Asp, Glu, Gly, His, Lys, Leu, Met, Asn, Gln, Arg, Ser, Thr, Val, Trp or Tyr
  MOD_RES (18)...(18): Xaa = Ala, Phe, His, Ile, Leu, Pro, Arg, Thr, Val or Tyr
  MOD_RES (19)...(19): Xaa = Ala, Asp, Glu, Phe, His, Ile, Lys, Leu, Met, Asn, Gln, Arg, Ser, Thr, Val, Trp or Tyr
  MOD_RES (21)...(21): Xaa = Ala, Asp, Glu, Phe, Gly, His, Ile, Lys, Leu, Met, Asn, Pro, Gln, Arg, Ser, Thr, Val, Trp or Tyr
  MOD_RES (23)...(23): Xaa = Ala, Asp, Glu, Phe, Gly, His, Ile, Lys, Leu, Asn, Pro, Gln, Arg, Ser, Thr, Val or Tyr
  MOD_RES (24)...(24): Xaa = Ala, Asp, Glu, Phe, His, Ile, Lys, Leu, Met, Asn, Pro, Gln, Arg, Ser, Thr or Val
  MOD_RES (25)...(25): Xaa = Asp, Glu, Gly, Asn, Pro or Ser
  MOD_RES (26)...(26): Xaa = Ala, Asp, Glu, Phe, His, Leu, Met, Gln, Arg, Ser, Thr, Trp or Tyr
  MOD_RES (27)...(27): Xaa = Ala, Asp, Glu, Phe, Gly, His, Ile, Lys, Leu, Met, Asn, Gln, Arg, Ser, Thr, Val or Tyr
  MOD_RES (28)...(28): Xaa = Ala, Phe, Gly, Ile, Lys, Leu, Met, Pro, Gln, Arg, Ser, Thr, Val, Trp or Tyr
  MOD_RES (29)...(29): Xaa = Ala, Asp, Glu, Phe, Gly, His, Lys, Leu, Met, Asn, Pro, Gln, Arg, Ser, Thr, Val or Trp
  MOD_RES (30)...(30): Xaa = Ala, Asp, Glu, Gly, Ile, Lys, Leu, Met, Asn, Pro, Gln, Arg, Ser, Thr, Val or Tyr
  MOD_RES (31)...(31): Xaa = Ala, Asp, Glu, Phe, Gly, His, Ile, Lys, Leu, Met, Asn, Gln, Ser, Thr or Val
  MOD_RES (32)...(32): Xaa = Glu, Phe, Gly, His, Ile, Lys, Leu, Met, Asn, Pro, Gln, Arg, Ser, Thr or Trp
  MOD_RES (33)...(33): Xaa = Ala, Asp, Glu, Phe, Gly, His, Lys, Leu, Met, Asn, Pro, Gln, Arg, Ser, Thr, Val or Tyr
CXXXXCXXXXCXXXXXXXXCXCXXXXXXXXXXXC

SEQ ID NO: 252 - protein, 35 aa, Artificial Sequence
  EGF domain monomer sequence
  MOD_RES (2)...(2): Xaa = Ala, Asp, Glu, Phe, Gly, His, Ile, Lys, Leu, Asn, Pro, Gln, Arg, Ser, Thr, Val or Trp
  MOD_RES (3)...(3): Xaa = Ala, Asp, Glu, Gly, His, Lys, Leu, Met, Asn, Pro, Arg, Ser, Thr or Tyr
  MOD_RES (4)...(4): Xaa = Ala, Asp, Glu, Gly, His, Lys, Leu, Met, Asn, Pro, Gln, Arg, Ser, Thr, Val or Trp
  MOD_RES (5)...(5): Xaa = Ala, Glu, Gly, Met, Asn, Pro, Gln, Arg, Ser, Thr or Tyr
  MOD_RES (7)...(7): Xaa = Ala, Asp, Glu, Phe, Gly, His, Ile, Lys, Leu, Met, Asn, Pro, Gln, Arg, Ser, Thr or Val
  MOD_RES (8)...(8): Xaa = Ala, Asp, Glu, Phe, Gly, His, Lys, Leu, Asn, Pro, Gln, Arg, Ser, Thr or Tyr
  MOD_RES (9)...(9): Xaa = Ala, Gly or Thr
  MOD_RES (10)...(10): Xaa = Ala, Asp, Glu, Phe, His, Ile, Lys, Leu, Met, Asn, Gln, Arg, Ser, Thr or Val
  MOD_RES (12)...(12): Xaa = Ala, Asp, Glu, Phe, Gly, His, Ile, Lys, Leu, Met, Asn, Gln, Arg, Ser, Thr, Val, Trp or Tyr
  MOD_RES (13)...(13): Xaa = Ala, Asp, Glu, Lys, Leu, Asn, Pro, Gln, Arg, Ser, Thr or Val
  MOD_RES (14)...(14): Xaa = Ala, Cys, Asp, Glu, Phe, Gly, His, Ile, Lys, Leu, Met, Asn, Pro, Gln, Arg, Ser, Thr, Val or Tyr
  MOD_RES (15)...(15): Xaa = Ala, Asp, Glu, Phe, Gly, His, Ile, Lys, Leu, Met, Asn, Pro, Gln, Arg, Ser, Thr, Val, Trp or Tyr
  MOD_RES (16)...(16): Xaa = Ala, Asp, Glu, Phe, Gly, His, Ile, Lys, Leu, Asn, Pro, Gln, Arg, Ser, Thr, Val or Trp
  MOD_RES (17)...(17): Xaa = Ala, Asp, Glu, Gly, His, Lys, Leu, Met, Asn, Gln, Arg, Ser, Thr, Val, Trp or Tyr
  MOD_RES (18)...(18): Xaa = Ala, Phe, His, Ile, Leu, Pro, Arg, Thr, Val or Tyr
  MOD_RES (19)...(19): Xaa = Ala, Asp, Glu, Phe, His, Ile, Lys, Leu, Met, Asn, Gln, Arg, Ser, Thr, Val, Trp or Tyr
  MOD_RES (21)...(21): Xaa = Ala, Asp, Glu, Phe, Gly, His, Ile, Lys, Leu, Met, Asn, Pro, Gln, Arg, Ser, Thr, Val, Trp or Tyr
  MOD_RES (23)...(23): Xaa = Ala, Asp, Glu, Phe, Gly, His, Ile, Lys, Leu, Asn, Pro, Gln, Arg, Ser, Thr, Val or Tyr
  MOD_RES (24)...(24): Xaa = Ala, Asp, Glu, Phe, His, Ile, Lys, Leu, Met, Asn, Pro, Gln, Arg, Ser, Thr or Val
  MOD_RES (25)...(25): Xaa = Asp, Glu, Gly, Asn, Pro or Ser
  MOD_RES (26)...(26): Xaa = Ala, Asp, Glu, Phe, His, Leu, Met, Gln, Arg, Ser, Thr, Trp or Tyr
  MOD_RES (27)...(27): Xaa = Ala, Asp, Glu, Phe, Gly, His, Ile, Lys, Leu, Met, Asn, Gln, Arg, Ser, Thr, Val or Tyr
  MOD_RES (28)...(28): Xaa = Ala, Phe, Gly, Ile, Lys, Leu, Met, Pro, Gln, Arg, Ser, Thr, Val, Trp or Tyr
  MOD_RES (29)...(29): Xaa = Ala, Asp, Glu, Phe, Gly, His, Lys, Leu, Met, Asn, Pro, Gln, Arg, Ser, Thr, Val or Trp
  MOD_RES (30)...(30): Xaa = Ala, Asp, Glu, Gly, Ile, Lys, Leu, Met, Asn, Pro, Gln, Arg, Ser, Thr, Val or Tyr
  MOD_RES (31)...(31): Xaa = Ala, Asp, Glu, Phe, Gly, His, Ile, Lys, Leu, Met, Asn, Gln, Ser, Thr or Val
  MOD_RES (32)...(32): Xaa = Glu, Phe, Gly, His, Ile, Lys, Leu, Met, Asn, Pro, Gln, Arg, Ser, Thr or Trp
  MOD_RES (33)...(33): Xaa = Ala, Asp, Glu, Phe, Gly, His, Lys, Leu, Met, Asn, Pro, Gln, Arg, Ser, Thr, Val or Tyr
  MOD_RES (34)...(34): Xaa = Ala, Asp, Glu, Phe, Gly, His, Ile, Lys, Met, Asn, Gln, Arg, Ser, Thr, Val or Tyr
CXXXXCXXXXCXXXXXXXXCXCXXXXXXXXXXXXC

SEQ ID NO: 253 - protein, 32 aa, Artificial Sequence
  EGF domain monomer sequence
  MOD_RES (2)...(2): Xaa = Ala, Asp, Glu, Phe, Gly, His, Ile, Lys, Leu, Asn, Pro, Gln, Arg, Ser, Thr, Val or Trp
  MOD_RES (3)...(3): Xaa = Ala, Asp, Glu, Gly, His, Lys, Leu, Met, Asn, Pro, Arg, Ser, Thr or Tyr
  MOD_RES (4)...(4): Xaa = Ala, Asp, Glu, Gly, His, Lys, Leu, Met, Asn, Pro, Gln, Arg, Ser, Thr, Val or Trp
  MOD_RES (5)...(5): Xaa = Ala, Glu, Gly, Met, Asn, Pro, Gln, Arg, Ser, Thr or Tyr
  MOD_RES (7)...(7): Xaa = Ala, Cys, Asp, Glu, Phe, Gly, His, Lys, Leu, Met, Asn, Pro, Gln, Arg, Ser, Val or Tyr
  MOD_RES (8)...(8): Xaa = Ala, Asp, Glu, Gly, His, Ile, Lys, Leu, Met, Asn, Pro, Gln, Arg, Ser, Thr, Val or Tyr
  MOD_RES (9)...(9): Xaa = Ala, Asp, Glu, Phe, Gly, His, Lys, Leu, Asn, Gln, Arg, Ser, Thr or Tyr
  MOD_RES (10)...(10): Xaa = Ala, Phe, Gly, His, Gln, Ser, Thr or Val
  MOD_RES (11)...(11): Xaa = Ala, Asp, Glu, Phe, His, Ile, Lys, Leu, Met, Asn, Gln, Arg, Ser, Thr or Val
  MOD_RES (13)...(13): Xaa = Ala, Asp, Glu, Phe, Gly, His, Ile, Lys, Leu, Met, Asn, Gln, Arg, Ser, Thr, Val, Trp or Tyr
  MOD_RES (14)...(14): Xaa = Ala, Asp, Glu, Lys, Leu, Asn, Pro, Gln, Arg, Ser, Thr or Val
  MOD_RES (15)...(15): Xaa = Ala, Cys, Asp, Glu, Phe, Gly, His, Ile, Lys, Leu, Met, Asn, Pro, Gln, Arg, Ser, Thr, Val or Tyr
  MOD_RES (16)...(16): Xaa = Ala, Asp, Glu, Phe, Gly, His, Ile, Lys, Leu, Met, Asn, Pro, Gln, Arg, Ser, Thr, Val, Trp or Tyr
  MOD_RES (17)...(17): Xaa = Ala, Asp, Glu, Phe, Gly, His, Ile, Lys, Leu, Asn, Pro, Gln, Arg, Ser, Thr, Val or Trp
  MOD_RES (18)...(18): Xaa = Ala, Asp, Glu, Gly, His, Lys, Leu, Met, Asn, Gln, Arg, Ser, Thr, Val, Trp or Tyr
  MOD_RES (19)...(19): Xaa = Ala, Phe, His, Ile, Leu, Pro, Arg, Thr, Val or Tyr
  MOD_RES (20)...(20): Xaa = Ala, Asp, Glu, Phe, His, Ile, Lys, Leu, Met, Asn, Gln, Arg, Ser, Thr, Val, Trp or Tyr
  MOD_RES (22)...(22): Xaa = Ala, Asp, Glu, Phe, Gly, His, Ile, Lys, Leu, Met, Asn, Pro, Gln, Arg, Ser, Thr, Val, Trp or Tyr
  MOD_RES (24)...(24): Xaa = Ala, Asp, Glu, Phe, His, Lys, Leu, Met, Asn, Pro, Gln, Arg, Ser, Thr, Val, Trp or Tyr
  MOD_RES (25)...(25): Xaa = Ala, Asp, Glu, Phe, Gly, His, Lys, Leu, Asn, Pro, Gln, Arg, Ser, Thr, Val or Tyr
  MOD_RES (26)...(26): Xaa = Ala, Glu, Gly, His, Lys, Leu, Asn, Pro, Arg, Ser, Thr or Tyr
  MOD_RES (27)...(27): Xaa = Phe, His, Ile, Leu, Met, Arg, Thr, Trp or Tyr
  MOD_RES (28)...(28): Xaa = Ala, Asp, Glu, Phe, Gly, His, Ile, Lys, Leu, Met, Asn, Gln, Arg, Ser, Thr, Val or Tyr
  MOD_RES (29)...(29): Xaa = Asp, Gly or Ser
  MOD_RES (30)...(30): Xaa = Ala, Asp, Glu, Phe, His, Ile, Lys, Leu, Asn, Pro, Gln, Arg, Ser, Thr, Val or Tyr
  MOD_RES (31)...(31): Xaa = Ala, Asp, Glu, Phe, His, Ile, Lys, Leu, Met, Asn, Gln, Arg, Ser, Thr or Tyr
CXXXXCXXXXXCXXXXXXXXCXCXXXXXXXXC

SEQ ID NO: 254 - protein, 33 aa, Artificial Sequence
  EGF domain monomer sequence
  MOD_RES (2)...(2): Xaa = Ala, Asp, Glu, Phe, Gly, His, Ile, Lys, Leu, Asn, Pro, Gln, Arg, Ser, Thr, Val or Trp
  MOD_RES (3)...(3): Xaa = Ala, Asp, Glu, Gly, His, Lys, Leu, Met, Asn, Pro, Arg, Ser, Thr or Tyr
  MOD_RES (4)...(4): Xaa = Ala, Asp, Glu, Gly, His, Lys, Leu, Met, Asn, Pro, Gln, Arg, Ser, Thr, Val or Trp
  MOD_RES (5)...(5): Xaa = Ala, Glu, Gly, Met, Asn, Pro, Gln, Arg, Ser, Thr or Tyr
  MOD_RES (7)...(7): Xaa = Ala, Cys, Asp, Glu, Phe, Gly, His, Lys, Leu, Met, Asn, Pro, Gln, Arg, Ser, Val or Tyr
  MOD_RES (8)...(8): Xaa = Ala, Asp, Glu, Gly, His, Ile, Lys, Leu, Met, Asn, Pro, Gln, Arg, Ser, Thr, Val or Tyr
  MOD_RES (9)...(9): Xaa = Ala, Asp, Glu, Phe, Gly, His, Lys, Leu, Asn, Gln, Arg, Ser, Thr or Tyr
  MOD_RES (10)...(10): Xaa = Ala, Phe, Gly, His, Gln, Ser, Thr or Val
  MOD_RES (11)...(11): Xaa = Ala, Asp, Glu, Phe, His, Ile, Lys, Leu, Met, Asn, Gln, Arg, Ser, Thr or Val
  MOD_RES (13)...(13): Xaa = Ala, Asp, Glu, Phe, Gly, His, Ile, Lys, Leu, Met, Asn, Gln, Arg, Ser, Thr, Val, Trp or Tyr
  MOD_RES (14)...(14): Xaa = Ala, Asp, Glu, Lys, Leu, Asn, Pro, Gln, Arg, Ser, Thr or Val
  MOD_RES (15)...(15): Xaa = Ala, Cys, Asp, Glu, Phe, Gly, His, Ile, Lys, Leu, Met, Asn, Pro, Gln, Arg, Ser, Thr, Val or Tyr
  MOD_RES (16)...(16): Xaa = Ala, Asp, Glu, Phe, Gly, His, Ile, Lys, Leu, Met, Asn, Pro, Gln, Arg, Ser, Thr, Val, Trp or Tyr
  MOD_RES (17)...(17): Xaa = Ala, Asp, Glu, Phe, Gly, His, Ile, Lys, Leu, Asn, Pro, Gln, Arg, Ser, Thr, Val or Trp
  MOD_RES (18)...(18): Xaa = Ala, Asp, Glu, Gly, His, Lys, Leu, Met, Asn, Gln, Arg, Ser, Thr, Val, Trp or Tyr
  MOD_RES (19)...(19): Xaa = Ala, Phe, His, Ile, Leu, Pro, Arg, Thr, Val or Tyr
  MOD_RES (20)...(20): Xaa = Ala, Asp, Glu, Phe, His, Ile, Lys, Leu, Met, Asn, Gln, Arg, Ser, Thr, Val, Trp or Tyr
  MOD_RES (22)...(22): Xaa = Ala, Asp, Glu, Phe, Gly, His, Ile, Lys, Leu, Met, Asn, Pro, Gln, Arg, Ser, Thr, Val, Trp or Tyr
  MOD_RES (24)...(24): Xaa = Ala, Asp, Glu, Phe, Gly, His, Ile, Lys, Leu, Asn, Pro, Gln, Arg, Ser, Thr, Val or Tyr
  MOD_RES (25)...(25): Xaa = Ala, Asp, Glu, Phe, His, Ile, Lys, Leu, Met, Asn, Pro, Gln, Arg, Ser, Thr or Val
  MOD_RES (26)...(26): Xaa = Asp, Glu, Gly, Asn, Pro or Ser
  MOD_RES (27)...(27): Xaa = Ala, Asp, Glu, Phe, His, Leu, Met, Gln, Arg, Ser, Thr, Trp or Tyr
  MOD_RES (28)...(28): Xaa = Ala, Asp, Glu, Phe, Gly, His, Ile, Lys, Leu, Met, Asn, Gln, Arg, Ser, Thr, Val or Tyr
  MOD_RES (29)...(29): Xaa = Ala, Phe, Gly, Ile, Lys, Leu, Met, Pro, Gln, Arg, Ser, Thr, Val, Trp or Tyr
  MOD_RES (30)...(30): Xaa = Ala, Asp, Glu, Phe, Gly, His, Lys, Leu, Met, Asn, Pro, Gln, Arg, Ser, Thr, Val or Trp
  MOD_RES (31)...(31): Xaa = Ala, Asp, Glu, Gly, Ile, Lys, Leu, Met, Asn, Pro, Gln, Arg, Ser, Thr, Val or Tyr
  MOD_RES (32)...(32): Xaa = Ala, Asp, Glu, Phe, Gly, His, Ile, Lys, Leu, Met, Asn, Gln, Ser, Thr or Val
CXXXXCXXXXXCXXXXXXXXCXCXXXXXXXXXC

SEQ ID NO: 255 - protein, 34 aa, Artificial Sequence
  EGF domain monomer sequence
  MOD_RES (2)...(2): Xaa = Ala, Asp, Glu, Phe, Gly, His, Ile, Lys, Leu, Asn, Pro, Gln, Arg, Ser, Thr, Val or Trp
  MOD_RES (3)...(3): Xaa = Ala, Asp, Glu, Gly, His, Lys, Leu, Met, Asn, Pro, Arg, Ser, Thr or Tyr
  MOD_RES (4)...(4): Xaa = Ala, Asp, Glu, Gly, His, Lys, Leu, Met, Asn, Pro, Gln, Arg, Ser, Thr, Val or Trp
  MOD_RES (5)...(5): Xaa = Ala, Glu, Gly, Met, Asn, Pro, Gln, Arg, Ser, Thr or Tyr
  MOD_RES (7)...(7): Xaa = Ala, Cys, Asp, Glu, Phe, Gly, His, Lys, Leu, Met, Asn, Pro, Gln, Arg, Ser, Val or Tyr
  MOD_RES (8)...(8): Xaa = Ala, Asp, Glu, Gly, His, Ile, Lys, Leu, Met, Asn, Pro, Gln, Arg, Ser, Thr, Val or Tyr
  MOD_RES (9)...(9): Xaa = Ala, Asp, Glu, Phe, Gly, His, Lys, Leu, Asn, Gln, Arg, Ser, Thr or Tyr
  MOD_RES (10)...(10): Xaa = Ala, Phe, Gly, His, Gln, Ser, Thr or Val
  MOD_RES (11)...(11): Xaa = Ala, Asp, Glu, Phe, His, Ile, Lys, Leu, Met, Asn, Gln, Arg, Ser, Thr or Val
  MOD_RES (13)...(13): Xaa = Ala, Asp, Glu, Phe, Gly, His, Ile, Lys, Leu, Met, Asn, Gln, Arg, Ser, Thr, Val, Trp or Tyr
  MOD_RES (14)...(14): Xaa = Ala, Asp, Glu, Lys, Leu, Asn, Pro, Gln, Arg, Ser, Thr or Val
  MOD_RES (15)...(15): Xaa = Ala, Cys, Asp, Glu, Phe, Gly, His, Ile, Lys, Leu, Met, Asn, Pro, Gln, Arg, Ser, Thr, Val or Tyr
  MOD_RES (16)...(16): Xaa = Ala, Asp, Glu, Phe, Gly, His, Ile, Lys, Leu, Met, Asn, Pro, Gln, Arg, Ser, Thr, Val, Trp or Tyr
  MOD_RES (17)...(17): Xaa = Ala, Asp, Glu, Phe, Gly, His, Ile, Lys, Leu, Asn, Pro, Gln, Arg, Ser, Thr, Val or Trp
  MOD_RES (18)...(18): Xaa = Ala, Asp, Glu, Gly, His, Lys, Leu, Met, Asn, Gln, Arg, Ser, Thr, Val, Trp or Tyr
  MOD_RES (19)...(19): Xaa = Ala, Phe, His, Ile, Leu, Pro, Arg, Thr, Val or Tyr
  MOD_RES (20)...(20): Xaa = Ala, Asp, Glu, Phe, His, Ile, Lys, Leu, Met, Asn, Gln, Arg, Ser, Thr, Val, Trp or Tyr
  MOD_RES (22)...(22): Xaa = Ala, Asp, Glu, Phe, Gly, His, Ile, Lys, Leu, Met, Asn, Pro, Gln, Arg, Ser, Thr, Val, Trp or Tyr
  MOD_RES (24)...(24): Xaa = Ala, Asp, Glu, Phe, Gly, His, Ile, Lys, Leu, Asn, Pro, Gln, Arg, Ser, Thr, Val or Tyr
  MOD_RES (25)...(25): Xaa = Ala, Asp, Glu, Phe, His, Ile, Lys, Leu, Met, Asn, Pro, Gln, Arg, Ser, Thr or Val
  MOD_RES (26)...(26): Xaa = Asp, Glu, Gly, Asn, Pro or Ser
  MOD_RES (27)...(27): Xaa = Ala, Asp, Glu, Phe, His, Leu, Met, Gln, Arg, Ser, Thr, Trp or Tyr
  MOD_RES (28)...(28): Xaa = Ala, Asp, Glu, Phe, Gly, His, Ile, Lys, Leu, Met, Asn, Gln, Arg, Ser, Thr, Val or Tyr
  MOD_RES (29)...(29): Xaa = Ala, Phe, Gly, Ile, Lys, Leu, Met, Pro, Gln, Arg, Ser, Thr, Val, Trp or Tyr
  MOD_RES (30)...(30): Xaa = Ala, Asp, Glu, Phe, Gly, His, Lys, Leu, Met, Asn, Pro, Gln, Arg, Ser, Thr, Val or Trp
  MOD_RES (31)...(31): Xaa = Ala, Asp, Glu, Gly, Ile, Lys, Leu, Met, Asn, Pro, Gln, Arg, Ser, Thr, Val or Tyr
  MOD_RES (32)...(32): Xaa = Ala, Asp, Glu, Phe, Gly, His, Ile, Lys, Leu, Met, Asn, Gln, Ser, Thr or Val
  MOD_RES (33)...(33): Xaa = Glu, Phe, Gly, His, Ile, Lys, Leu, Met, Asn, Pro, Gln, Arg, Ser, Thr or Trp
CXXXXCXXXXXCXXXXXXXXCXCXXXXXXXXXXC

SEQ ID NO: 256 - protein, 35 aa, Artificial Sequence
  EGF domain monomer sequence
  MOD_RES (2)...(2): Xaa = Ala, Asp, Glu, Phe, Gly, His, Ile, Lys, Leu, Asn, Pro, Gln, Arg, Ser, Thr, Val or Trp
  MOD_RES (3)...(3): Xaa = Ala, Asp, Glu, Gly, His, Lys, Leu, Met, Asn, Pro, Arg, Ser, Thr or Tyr
  MOD_RES (4)...(4): Xaa = Ala, Asp, Glu, Gly, His, Lys, Leu, Met, Asn, Pro, Gln, Arg, Ser, Thr, Val or Trp
  MOD_RES (5)...(5): Xaa = Ala, Glu, Gly, Met, Asn, Pro, Gln, Arg, Ser, Thr or Tyr
  MOD_RES (7)...(7): Xaa = Ala, Cys, Asp, Glu, Phe, Gly, His, Lys, Leu, Met, Asn, Pro, Gln, Arg, Ser, Val or Tyr
  MOD_RES (8)...(8): Xaa = Ala, Asp, Glu, Gly, His, Ile, Lys, Leu, Met, Asn, Pro, Gln, Arg, Ser, Thr, Val or Tyr
  MOD_RES (9)...(9): Xaa = Ala, Asp, Glu, Phe, Gly, His, Lys, Leu, Asn, Gln, Arg, Ser, Thr or Tyr
  MOD_RES (10)...(10): Xaa = Ala, Phe, Gly, His, Gln, Ser, Thr or Val
  MOD_RES (11)...(11): Xaa = Ala, Asp, Glu, Phe, His, Ile, Lys, Leu, Met, Asn, Gln, Arg, Ser, Thr or Val
  MOD_RES (13)...(13): Xaa = Ala, Asp, Glu, Phe, Gly, His, Ile, Lys, Leu, Met, Asn, Gln, Arg, Ser, Thr, Val, Trp or Tyr
  MOD_RES (14)...(14): Xaa = Ala, Asp, Glu, Lys, Leu, Asn, Pro, Gln, Arg, Ser, Thr or Val
  MOD_RES (15)...(15): Xaa = Ala, Cys, Asp, Glu, Phe, Gly, His, Ile, Lys, Leu, Met, Asn, Pro, Gln, Arg, Ser, Thr, Val or Tyr
  MOD_RES (16)...(16): Xaa = Ala, Asp, Glu, Phe, Gly, His, Ile, Lys, Leu, Met, Asn, Pro, Gln, Arg, Ser, Thr, Val, Trp or Tyr
  MOD_RES (17)...(17): Xaa = Ala, Asp, Glu, Phe, Gly, His, Ile, Lys, Leu, Asn, Pro, Gln, Arg, Ser, Thr, Val or Trp
  MOD_RES (18)...(18): Xaa = Ala, Asp, Glu, Gly, His, Lys, Leu, Met, Asn, Gln, Arg, Ser, Thr, Val, Trp or Tyr
  MOD_RES (19)...(19): Xaa = Ala, Phe, His, Ile, Leu, Pro, Arg, Thr, Val or Tyr
  MOD_RES (20)...(20): Xaa = Ala, Asp, Glu, Phe, His, Ile, Lys, Leu, Met, Asn, Gln, Arg, Ser, Thr, Val, Trp or Tyr
  MOD_RES (22)...(22): Xaa = Ala, Asp, Glu, Phe, Gly, His, Ile, Lys, Leu, Met, Asn, Pro, Gln, Arg, Ser, Thr, Val, Trp or Tyr
  MOD_RES (24)...(24): Xaa = Ala, Asp, Glu, Phe, Gly, His, Ile, Lys, Leu, Asn, Pro, Gln, Arg, Ser, Thr, Val or Tyr
  MOD_RES (25)...(25): Xaa = Ala, Asp, Glu, Phe, His, Ile, Lys, Leu, Met, Asn, Pro, Gln, Arg, Ser, Thr or Val
  MOD_RES (26)...(26): Xaa = Asp, Glu, Gly, Asn, Pro or Ser
  MOD_RES (27)...(27): Xaa = Ala, Asp, Glu, Phe, His, Leu, Met, Gln, Arg, Ser, Thr, Trp or Tyr
  MOD_RES (28)...(28): Xaa = Ala, Asp, Glu, Phe, Gly, His, Ile, Lys, Leu, Met, Asn, Gln, Arg, Ser, Thr, Val or Tyr
  MOD_RES (29)...(29): Xaa = Ala, Phe, Gly, Ile, Lys, Leu, Met, Pro, Gln, Arg, Ser, Thr, Val, Trp or Tyr
  MOD_RES (30)...(30): Xaa = Ala, Asp, Glu, Phe, Gly, His, Lys, Leu, Met, Asn, Pro, Gln, Arg, Ser, Thr, Val or Trp
  MOD_RES (31)...(31): Xaa = Ala, Asp, Glu, Gly, Ile, Lys, Leu, Met, Asn, Pro, Gln, Arg, Ser, Thr, Val or Tyr
  MOD_RES (32)...(32): Xaa = Ala, Asp, Glu, Phe, Gly, His, Ile, Lys, Leu, Met, Asn, Gln, Ser, Thr or Val
  MOD_RES (33)...(33): Xaa = Glu, Phe, Gly, His, Ile, Lys, Leu, Met, Asn, Pro, Gln, Arg, Ser, Thr or Trp
  MOD_RES (34)...(34): Xaa = Ala, Asp, Glu, Phe, Gly, His, Lys, Leu, Met, Asn, Pro, Gln, Arg, Ser, Thr, Val or Tyr
CXXXXCXXXXXCXXXXXXXXCXCXXXXXXXXXXXC

SEQ ID NO: 257 - protein, 36 aa, Artificial Sequence
  EGF domain monomer sequence
  MOD_RES (2)...(2): Xaa = Ala, Asp, Glu, Phe, Gly, His, Ile, Lys, Leu, Asn, Pro, Gln, Arg, Ser, Thr, Val or Trp
  MOD_RES (3)...(3): Xaa = Ala, Asp, Glu, Gly, His, Lys, Leu, Met, Asn, Pro, Arg, Ser, Thr or Tyr
  MOD_RES (4)...(4): Xaa = Ala, Asp, Glu, Gly, His, Lys, Leu, Met, Asn, Pro, Gln, Arg, Ser, Thr, Val or Trp
  MOD_RES (5)...(5): Xaa = Ala, Glu, Gly, Met, Asn, Pro, Gln, Arg, Ser, Thr or Tyr
  MOD_RES (7)...(7): Xaa = Ala, Cys, Asp, Glu, Phe, Gly, His, Lys, Leu, Met, Asn, Pro, Gln, Arg, Ser, Val or Tyr
  MOD_RES (8)...(8): Xaa = Ala, Asp, Glu, Gly, His, Ile, Lys, Leu, Met, Asn, Pro, Gln, Arg, Ser, Thr, Val or Tyr
  MOD_RES (9)...(9): Xaa = Ala, Asp, Glu, Phe, Gly, His, Lys, Leu, Asn, Gln, Arg, Ser, Thr or Tyr
  MOD_RES (10)...(10): Xaa = Ala, Phe, Gly, His, Gln, Ser, Thr or Val
  MOD_RES (11)...(11): Xaa = Ala, Asp, Glu, Phe, His, Ile, Lys, Leu, Met, Asn, Gln, Arg, Ser, Thr or Val
  MOD_RES (13)...(13): Xaa = Ala, Asp, Glu, Phe, Gly, His, Ile, Lys, Leu, Met, Asn, Gln, Arg, Ser, Thr, Val, Trp or Tyr
  MOD_RES (14)...(14): Xaa = Ala, Asp, Glu, Lys, Leu, Asn, Pro, Gln, Arg, Ser, Thr or Val
  MOD_RES (15)...(15): Xaa = Ala, Cys, Asp, Glu, Phe, Gly, His, Ile, Lys, Leu, Met, Asn, Pro, Gln, Arg, Ser, Thr, Val or Tyr
  MOD_RES (16)...(16): Xaa = Ala, Asp, Glu, Phe, Gly, His, Ile, Lys, Leu, Met, Asn, Pro, Gln, Arg, Ser, Thr, Val, Trp or Tyr
  MOD_RES (17)...(17): Xaa = Ala, Asp, Glu, Phe, Gly, His, Ile, Lys, Leu, Asn, Pro, Gln, Arg, Ser, Thr, Val or Trp
  MOD_RES (18)...(18): Xaa = Ala, Asp, Glu, Gly, His, Lys, Leu, Met, Asn, Gln, Arg, Ser, Thr, Val, Trp or Tyr
  MOD_RES (19)...(19): Xaa = Ala, Phe, His, Ile, Leu, Pro, Arg, Thr, Val or Tyr
  MOD_RES (20)...(20): Xaa = Ala, Asp, Glu, Phe, His, Ile, Lys, Leu, Met, Asn, Gln, Arg, Ser, Thr, Val, Trp or Tyr
  MOD_RES (22)...(22): Xaa = Ala, Asp, Glu, Phe, Gly, His, Ile, Lys, Leu, Met, Asn, Pro, Gln, Arg, Ser, Thr, Val, Trp or Tyr
  MOD_RES (24)...(24): Xaa = Ala, Asp, Glu, Phe, Gly, His, Ile, Lys, Leu, Asn, Pro, Gln, Arg, Ser, Thr, Val or Tyr
  MOD_RES (25)...(25): Xaa = Ala, Asp, Glu, Phe, His, Ile, Lys, Leu, Met, Asn, Pro, Gln, Arg, Ser, Thr or Val
  MOD_RES (26)...(26): Xaa = Asp, Glu, Gly, Asn, Pro or Ser
  MOD_RES (27)...(27): Xaa = Ala, Asp, Glu, Phe, His, Leu, Met, Gln, Arg, Ser, Thr, Trp or Tyr
  MOD_RES (28)...(28): Xaa = Ala, Asp, Glu, Phe, Gly, His, Ile, Lys, Leu, Met, Asn, Gln, Arg, Ser, Thr, Val or Tyr
  MOD_RES (29)...(29): Xaa = Ala, Phe, Gly, Ile, Lys, Leu, Met, Pro, Gln, Arg, Ser, Thr, Val, Trp or Tyr
  MOD_RES (30)...(30): Xaa = Ala, Asp, Glu, Phe, Gly, His, Lys, Leu, Met, Asn, Pro, Gln, Arg, Ser, Thr, Val or Trp
  MOD_RES (31)...(31): Xaa = Ala, Asp, Glu, Gly, Ile, Lys, Leu, Met, Asn, Pro, Gln, Arg, Ser, Thr, Val or Tyr
  MOD_RES (32)...(32): Xaa = Ala, Asp, Glu, Phe, Gly, His, Ile, Lys, Leu, Met, Asn, Gln, Ser, Thr or Val
  MOD_RES (33)...(33): Xaa = Glu, Phe, Gly, His, Ile, Lys, Leu, Met, Asn, Pro, Gln, Arg, Ser, Thr or Trp
  MOD_RES (34)...(34): Xaa = Ala, Asp, Glu, Phe, Gly, His, Lys, Leu, Met, Asn, Pro, Gln, Arg, Ser, Thr, Val or Tyr
  MOD_RES (35)...(35): Xaa = Ala, Asp, Glu, Phe, Gly, His, Ile, Lys, Met, Asn, Gln, Arg, Ser, Thr, Val or Tyr
CXXXXCXXXXXCXXXXXXXXCXCXXXXXXXXXXXXC

SEQ ID NO: 258 - protein, 31 aa, Artificial Sequence
  EGF domain monomer sequence
  MOD_RES (2)...(2): Xaa = Ala, Asp, Glu, Phe, Gly, His, Ile, Lys, Leu, Asn, Pro, Gln, Arg, Ser, Thr, Val or Trp
  MOD_RES (3)...(3): Xaa = Ala, Asp, Glu, Gly, His, Lys, Leu, Met, Asn, Pro, Arg, Ser, Thr or Tyr
  MOD_RES (4)...(4): Xaa = Ala, Asp, Glu, Gly, His, Lys, Leu, Met, Asn, Pro, Gln, Arg, Ser, Thr, Val or Trp
  MOD_RES (5)...(5): Xaa = Ala, Glu, Gly, Met, Asn, Pro, Gln, Arg, Ser, Thr or Tyr
  MOD_RES (7)...(7): Xaa = Ala, Asp, Glu, Gly, His, Lys, Asn, Pro, Gln, Ser, Thr or Val
  MOD_RES (8)...(8): Xaa = Phe, Gly, His, Leu, Asn, Gln, Ser, Thr or Tyr
  MOD_RES (9)...(9): Xaa = Ala, Asp, Glu, Phe, Gly, His, Ile, Lys, Leu, Asn, Gln, Arg, Ser, Thr, Val or Tyr
  MOD_RES (11)...(11): Xaa = Ala, Asp, Phe, His, Ile, Lys, Leu, Met, Asn, Gln, Arg, Ser, Thr, Val or Tyr
  MOD_RES (12)...(12): Xaa = Ala, Asp, Glu, Phe, His, Leu, Met, Asn, Pro, Gln, Arg, Ser, Val or Tyr
  MOD_RES (13)...(13): Xaa = Ala, Asp, Glu, Phe, Gly, His, Leu, Asn, Arg, Ser, Thr, Val or Tyr
  MOD_RES (14)...(14): Xaa = Ala, Asp, Glu, Gly, Asn, Pro, Gln, Arg, Ser or Thr
  MOD_RES (15)...(15): Xaa = Ala, Asp, Glu, Phe, Gly, Lys, Leu, Asn, Pro, Gln, Arg, Ser or Thr
  MOD_RES (16)...(16): Xaa = Ala, Asp, Glu, Gly, Met, Asn, Arg, Ser, Thr, Val or Tyr
  MOD_RES (17)...(17): Xaa = Ala, Asp, Glu, Gly, Lys, Leu, Met, Gln, Arg, Ser or Thr
  MOD_RES (18)...(18): Xaa = Phe, His, Ile, Pro, Arg, Val, Trp or Tyr
  MOD_RES (19)...(19): Xaa = Ala, Glu, His, Lys, Leu, Gln, Ser, Thr, Val or Tyr
  MOD_RES (21)...(21): Xaa = Ala, Asp, Glu, Phe, Gly, His, Ile, Lys, Leu, Met, Asn, Pro, Gln, Arg, Ser, Thr, Val, Trp or Tyr
  MOD_RES (23)...(23): Xaa = Ala, Asp, Glu, Phe, His, Lys, Leu, Met, Asn, Pro, Gln, Arg, Ser, Thr, Val, Trp or Tyr
  MOD_RES (24)...(24): Xaa = Ala, Asp, Glu, Phe, Gly, His, Lys, Leu, Asn, Pro, Gln, Arg, Ser, Thr, Val or Tyr
  MOD_RES (25)...(25): Xaa = Ala, Glu, Gly, His, Lys, Leu, Asn, Pro, Arg, Ser, Thr or Tyr
  MOD_RES (26)...(26): Xaa = Phe, His, Ile, Leu, Met, Arg, Thr, Trp or Tyr
  MOD_RES (27)...(27): Xaa = Ala, Asp, Glu, Phe, Gly, His, Ile, Lys, Leu, Met, Asn, Gln, Arg, Ser, Thr, Val or Tyr
  MOD_RES (28)...(28): Xaa = Asp, Gly or Ser
  MOD_RES (29)...(29): Xaa = Ala, Asp, Glu, Phe, His, Ile, Lys, Leu, Asn, Pro, Gln, Arg, Ser, Thr, Val or Tyr
  MOD_RES (30)...(30): Xaa = Ala, Asp, Glu, Phe, His, Ile, Lys, Leu, Met, Asn, Gln, Arg, Ser, Thr or Tyr
CXXXXCXXXCXXXXXXXXXCXCXXXXXXXXC

SEQ ID NO: 259 - protein, 32 aa, Artificial Sequence
  EGF domain monomer sequence
  MOD_RES (2)...(2): Xaa = Ala, Asp, Glu, Phe, Gly, His, Ile, Lys, Leu, Asn, Pro, Gln, Arg, Ser, Thr, Val or Trp
  MOD_RES (3)...(3): Xaa = Ala, Asp, Glu, Gly, His, Lys, Leu, Met, Asn, Pro, Arg, Ser, Thr or Tyr
  MOD_RES (4)...(4): Xaa = Ala, Asp, Glu, Gly, His, Lys, Leu, Met, Asn, Pro, Gln, Arg, Ser, Thr, Val or Trp
  MOD_RES (5)...(5): Xaa = Ala, Glu, Gly, Met, Asn, Pro, Gln, Arg, Ser, Thr or Tyr
  MOD_RES (7)...(7): Xaa = Ala, Asp, Glu, Gly, His, Lys, Asn, Pro, Gln, Ser, Thr or Val
  MOD_RES (8)...(8): Xaa = Phe, Gly, His, Leu, Asn, Gln, Ser, Thr or Tyr
  MOD_RES (9)...(9): Xaa = Ala, Asp, Glu, Phe, Gly, His, Ile, Lys, Leu, Asn, Gln, Arg, Ser, Thr, Val or Tyr
  MOD_RES (11)...(11): Xaa = Ala, Asp, Phe, His, Ile, Lys, Leu, Met, Asn, Gln, Arg, Ser, Thr, Val or Tyr
  MOD_RES (12)...(12): Xaa = Ala, Asp, Glu, Phe, His, Leu, Met, Asn, Pro, Gln, Arg, Ser, Val or Tyr
  MOD_RES (13)...(13): Xaa = Ala, Asp, Glu, Phe, Gly, His, Leu, Asn, Arg, Ser, Thr, Val or Tyr
  MOD_RES (14)...(14): Xaa = Ala, Asp, Glu, Gly, Asn, Pro, Gln, Arg, Ser or Thr
  MOD_RES (15)...(15): Xaa = Ala, Asp, Glu, Phe, Gly, Lys, Leu, Asn, Pro, Gln, Arg, Ser or Thr
  MOD_RES (16)...(16): Xaa = Ala, Asp, Glu, Gly, Met, Asn, Arg, Ser, Thr, Val or Tyr
  MOD_RES (17)...(17): Xaa = Ala, Asp, Glu, Gly, Lys, Leu, Met, Gln, Arg, Ser or Thr
  MOD_RES (18)...(18): Xaa = Phe, His, Ile, Pro, Arg, Val, Trp or Tyr
  MOD_RES (19)...(19): Xaa = Ala, Glu, His, Lys, Leu, Gln, Ser, Thr, Val or Tyr
  MOD_RES (21)...(21): Xaa = Ala, Asp, Glu, Phe, Gly, His, Ile, Lys, Leu, Met, Asn, Pro, Gln, Arg, Ser, Thr, Val, Trp or Tyr
  MOD_RES (23)...(23): Xaa = Ala, Asp, Glu, Phe, Gly, His, Ile, Lys, Leu, Asn, Pro, Gln, Arg, Ser, Thr, Val or Tyr
  MOD_RES (24)...(24): Xaa = Ala, Asp, Glu, Phe, His, Ile, Lys, Leu, Met, Asn, Pro, Gln, Arg, Ser, Thr or Val
  MOD_RES (25)...(25): Xaa = Asp, Glu, Gly, Asn, Pro or Ser
  MOD_RES (26)...(26): Xaa = Ala, Asp, Glu, Phe, His, Leu, Met, Gln, Arg, Ser, Thr, Trp or Tyr
  MOD_RES (27)...(27): Xaa = Ala, Asp, Glu, Phe, Gly, His, Ile, Lys, Leu, Met, Asn, Gln, Arg, Ser, Thr, Val or Tyr
  MOD_RES (28)...(28): Xaa = Ala, Phe, Gly, Ile, Lys, Leu, Met, Pro, Gln, Arg, Ser, Thr, Val, Trp or Tyr
  MOD_RES (29)...(29): Xaa = Ala, Asp, Glu, Phe, Gly, His, Lys, Leu, Met, Asn, Pro, Gln, Arg, Ser, Thr, Val or Trp
  MOD_RES (30)...(30): Xaa = Ala, Asp, Glu, Gly, Ile, Lys, Leu, Met, Asn, Pro, Gln, Arg, Ser, Thr, Val or Tyr
  MOD_RES (31)...(31): Xaa = Ala, Asp, Glu, Phe, Gly, His, Ile, Lys, Leu, Met, Asn, Gln, Ser, Thr or Val
CXXXXCXXXCXXXXXXXXXCXCXXXXXXXXXC

SEQ ID NO: 260 - protein, 33 aa, Artificial Sequence
  EGF domain monomer sequence
  MOD_RES (2)...(2): Xaa = Ala, Asp, Glu, Phe, Gly, His, Ile, Lys, Leu, Asn, Pro, Gln, Arg, Ser, Thr, Val or Trp
  MOD_RES (3)...(3): Xaa = Ala, Asp, Glu, Gly, His, Lys, Leu, Met, Asn, Pro, Arg, Ser, Thr or Tyr
  MOD_RES (4)...(4): Xaa = Ala, Asp, Glu, Gly, His, Lys, Leu, Met, Asn, Pro, Gln, Arg, Ser, Thr, Val or Trp
  MOD_RES (5)...(5): Xaa = Ala, Glu, Gly, Met, Asn, Pro, Gln, Arg, Ser, Thr or Tyr
  MOD_RES (7)...(7): Xaa = Ala, Asp, Glu, Gly, His, Lys, Asn, Pro, Gln, Ser, Thr or Val
  MOD_RES (8)...(8): Xaa = Phe, Gly, His, Leu, Asn, Gln, Ser, Thr or Tyr
  MOD_RES (9)...(9): Xaa = Ala, Asp, Glu, Phe, Gly, His, Ile, Lys, Leu, Asn, Gln, Arg, Ser, Thr, Val or Tyr
  MOD_RES (11)...(11): Xaa = Ala, Asp, Phe, His, Ile, Lys, Leu, Met, Asn, Gln, Arg, Ser, Thr, Val or Tyr
  MOD_RES (12)...(12): Xaa = Ala, Asp, Glu, Phe, His, Leu, Met, Asn, Pro, Gln, Arg, Ser, Val or Tyr
  MOD_RES (13)...(13): Xaa = Ala, Asp, Glu, Phe, Gly, His, Leu, Asn, Arg, Ser, Thr, Val or Tyr
  MOD_RES (14)...(14): Xaa = Ala, Asp, Glu, Gly, Asn, Pro, Gln, Arg, Ser or Thr
  MOD_RES (15)...(15): Xaa = Ala, Asp, Glu, Phe, Gly, Lys, Leu, Asn, Pro, Gln, Arg, Ser or Thr
  MOD_RES (16)...(16): Xaa = Ala, Asp, Glu, Gly, Met, Asn, Arg, Ser, Thr, Val or Tyr
  MOD_RES (17)...(17): Xaa = Ala, Asp, Glu, Gly, Lys, Leu, Met, Gln, Arg, Ser or Thr
  MOD_RES (18)...(18): Xaa = Phe, His, Ile, Pro, Arg, Val, Trp or Tyr
  MOD_RES (19)...(19): Xaa = Ala, Glu, His, Lys, Leu, Gln, Ser, Thr, Val or Tyr
  MOD_RES (21)...(21): Xaa = Ala, Asp, Glu, Phe, Gly, His, Ile, Lys, Leu, Met, Asn, Pro, Gln, Arg, Ser, Thr, Val, Trp or Tyr
  MOD_RES (23)...(23): Xaa = Ala, Asp, Glu, Phe, Gly, His, Ile, Lys, Leu, Asn, Pro, Gln, Arg, Ser, Thr, Val or Tyr
  MOD_RES (24)...(24): Xaa = Ala, Asp, Glu, Phe, His, Ile, Lys, Leu, Met, Asn, Pro, Gln, Arg, Ser, Thr or Val
  MOD_RES (25)...(25): Xaa = Asp, Glu, Gly, Asn, Pro or Ser
  MOD_RES (26)...(26): Xaa = Ala, Asp, Glu, Phe, His, Leu, Met, Gln, Arg, Ser, Thr, Trp or Tyr
  MOD_RES (27)...(27): Xaa = Ala, Asp, Glu, Phe, Gly, His, Ile, Lys, Leu, Met, Asn, Gln, Arg, Ser, Thr, Val or Tyr
  MOD_RES (28)...(28): Xaa = Ala, Phe, Gly, Ile, Lys, Leu, Met, Pro, Gln, Arg, Ser, Thr, Val, Trp or Tyr
  MOD_RES (29)...(29): Xaa = Ala, Asp, Glu, Phe, Gly, His, Lys, Leu, Met, Asn, Pro, Gln, Arg, Ser, Thr, Val or Trp
  MOD_RES (30)...(30): Xaa = Ala, Asp, Glu, Gly, Ile, Lys, Leu, Met, Asn, Pro, Gln, Arg, Ser, Thr, Val or Tyr
  MOD_RES (31)...(31): Xaa = Ala, Asp, Glu, Phe, Gly, His, Ile, Lys, Leu, Met, Asn, Gln, Ser, Thr or Val
  MOD_RES (32)...(32): Xaa = Glu, Phe, Gly, His, Ile, Lys, Leu, Met, Asn, Pro, Gln, Arg, Ser, Thr or Trp
CXXXXCXXXCXXXXXXXXXCXCXXXXXXXXXXC

SEQ ID NO: 261 - protein, 34 aa, Artificial Sequence
  EGF domain monomer sequence
  MOD_RES (2)...(2): Xaa = Ala, Asp, Glu, Phe, Gly, His, Ile, Lys, Leu, Asn, Pro, Gln, Arg, Ser, Thr, Val or Trp
  MOD_RES (3)...(3): Xaa = Ala, Asp, Glu, Gly, His, Lys, Leu, Met, Asn, Pro, Arg, Ser, Thr or Tyr
  MOD_RES (4)...(4): Xaa = Ala, Asp, Glu, Gly, His, Lys, Leu, Met, Asn, Pro, Gln, Arg, Ser, Thr, Val or Trp
  MOD_RES (5)...(5): Xaa = Ala, Glu, Gly, Met, Asn, Pro, Gln, Arg, Ser, Thr or Tyr
  MOD_RES (7)...(7): Xaa = Ala, Asp, Glu, Gly, His, Lys, Asn, Pro, Gln, Ser, Thr or Val
  MOD_RES (8)...(8): Xaa = Phe, Gly, His, Leu, Asn, Gln, Ser, Thr or Tyr
  MOD_RES (9)...(9): Xaa = Ala, Asp, Glu, Phe, Gly, His, Ile, Lys, Leu, Asn, Gln, Arg, Ser, Thr, Val or Tyr
  MOD_RES (11)...(11): Xaa = Ala, Asp, Phe, His, Ile, Lys, Leu, Met, Asn, Gln, Arg, Ser, Thr, Val or Tyr
  MOD_RES (12)...(12): Xaa = Ala, Asp, Glu, Phe, His, Leu, Met, Asn, Pro, Gln, Arg, Ser, Val or Tyr
  MOD_RES (13)...(13): Xaa = Ala, Asp, Glu, Phe, Gly, His, Leu, Asn, Arg, Ser, Thr, Val or Tyr
  MOD_RES (14)...(14): Xaa = Ala, Asp, Glu, Gly, Asn, Pro, Gln, Arg, Ser or Thr
  MOD_RES (15)...(15): Xaa = Ala, Asp, Glu, Phe, Gly, Lys, Leu, Asn, Pro, Gln, Arg, Ser or Thr
  MOD_RES (16)...(16): Xaa = Ala, Asp, Glu, Gly, Met, Asn, Arg, Ser, Thr, Val or Tyr
  MOD_RES (17)...(17): Xaa = Ala, Asp, Glu, Gly, Lys, Leu, Met, Gln, Arg, Ser or Thr
  MOD_RES (18)...(18): Xaa = Phe, His, Ile, Pro, Arg, Val, Trp or Tyr
  MOD_RES (19)...(19): Xaa = Ala, Glu, His, Lys, Leu, Gln, Ser, Thr, Val or Tyr
  MOD_RES (21)...(21): Xaa = Ala, Asp, Glu, Phe, Gly, His, Ile, Lys, Leu, Met, Asn, Pro, Gln, Arg, Ser, Thr, Val, Trp or Tyr
  MOD_RES (23)...(23): Xaa = Ala, Asp, Glu, Phe, Gly, His, Ile, Lys, Leu, Asn, Pro, Gln, Arg, Ser, Thr, Val or Tyr
  MOD_RES (24)...(24): Xaa = Ala, Asp, Glu, Phe, His, Ile, Lys, Leu, Met, Asn, Pro, Gln, Arg, Ser, Thr or Val
  MOD_RES (25)...(25): Xaa = Asp, Glu, Gly, Asn, Pro or Ser
  MOD_RES (26)...(26): Xaa = Ala, Asp, Glu, Phe, His, Leu, Met, Gln, Arg, Ser, Thr, Trp or Tyr
  MOD_RES (27)...(27): Xaa = Ala, Asp, Glu, Phe, Gly, His, Ile, Lys, Leu, Met, Asn, Gln, Arg, Ser, Thr, Val or Tyr
  MOD_RES (28)...(28): Xaa = Ala, Phe, Gly, Ile, Lys, Leu, Met, Pro, Gln, Arg, Ser, Thr, Val, Trp or Tyr
  MOD_RES (29)...(29): Xaa = Ala, Asp, Glu, Phe, Gly, His, Lys, Leu, Met, Asn, Pro, Gln, Arg, Ser, Thr, Val or Trp
  MOD_RES (30)...(30): Xaa = Ala, Asp, Glu, Gly, Ile, Lys, Leu, Met, Asn, Pro, Gln, Arg, Ser, Thr, Val or Tyr
  MOD_RES (31)...(31): Xaa = Ala, Asp, Glu, Phe, Gly, His, Ile, Lys, Leu, Met, Asn, Gln, Ser, Thr or Val
  MOD_RES (32)...(32): Xaa = Glu, Phe, Gly, His, Ile, Lys, Leu, Met, Asn, Pro, Gln, Arg, Ser, Thr or Trp
  MOD_RES (33)...(33): Xaa = Ala, Asp, Glu, Phe, Gly, His, Lys, Leu, Met, Asn, Pro, Gln, Arg, Ser, Thr, Val or Tyr
CXXXXCXXXCXXXXXXXXXCXCXXXXXXXXXXXC

SEQ ID NO: 262 - protein, 35 aa, Artificial Sequence
  EGF domain monomer sequence
  MOD_RES (2)...(2): Xaa = Ala, Asp, Glu, Phe, Gly, His, Ile, Lys, Leu, Asn, Pro, Gln, Arg, Ser, Thr, Val or Trp
  MOD_RES (3)...(3): Xaa = Ala, Asp, Glu, Gly, His, Lys, Leu, Met, Asn, Pro, Arg, Ser, Thr or Tyr
  MOD_RES (4)...(4): Xaa = Ala, Asp, Glu, Gly, His, Lys, Leu, Met, Asn, Pro, Gln, Arg, Ser, Thr, Val or Trp
  MOD_RES (5)...(5): Xaa = Ala, Glu, Gly, Met, Asn, Pro, Gln, Arg, Ser, Thr or Tyr
  MOD_RES (7)...(7): Xaa = Ala, Asp, Glu, Gly, His, Lys, Asn, Pro, Gln, Ser, Thr or Val
  MOD_RES (8)...(8): Xaa = Phe, Gly, His, Leu, Asn, Gln, Ser, Thr or Tyr
  MOD_RES (9)...(9): Xaa = Ala, Asp, Glu, Phe, Gly, His, Ile, Lys, Leu, Asn, Gln, Arg, Ser, Thr, Val or Tyr
  MOD_RES (11)...(11): Xaa = Ala, Asp, Phe, His, Ile, Lys, Leu, Met, Asn, Gln, Arg, Ser, Thr, Val or Tyr
  MOD_RES (12)...(12): Xaa = Ala, Asp, Glu, Phe, His, Leu, Met, Asn, Pro, Gln, Arg, Ser, Val or Tyr
  MOD_RES (13)...(13): Xaa = Ala, Asp, Glu, Phe, Gly, His, Leu, Asn, Arg, Ser, Thr, Val or Tyr
  MOD_RES (14)...(14): Xaa = Ala, Asp, Glu, Gly, Asn, Pro, Gln, Arg, Ser or Thr
  MOD_RES (15)...(15): Xaa = Ala, Asp, Glu, Phe, Gly, Lys, Leu, Asn, Pro, Gln, Arg, Ser or Thr
  MOD_RES (16)...(16): Xaa = Ala, Asp, Glu, Gly, Met, Asn, Arg, Ser, Thr, Val or Tyr
  MOD_RES (17)...(17): Xaa = Ala, Asp, Glu, Gly, Lys, Leu, Met, Gln, Arg, Ser or Thr
  MOD_RES (18)...(18): Xaa = Phe, His, Ile, Pro, Arg, Val, Trp or Tyr
  MOD_RES (19)...(19): Xaa = Ala, Glu, His, Lys, Leu, Gln, Ser, Thr, Val or Tyr
  MOD_RES (21)...(21): Xaa = Ala, Asp, Glu, Phe, Gly, His, Ile, Lys, Leu, Met, Asn, Pro, Gln, Arg, Ser, Thr, Val, Trp or Tyr
  MOD_RES (23)...(23): Xaa = Ala, Asp, Glu, Phe, Gly, His, Ile, Lys, Leu, Asn, Pro, Gln, Arg, Ser, Thr, Val or Tyr
  MOD_RES (24)...(24): Xaa = Ala, Asp, Glu, Phe, His, Ile, Lys, Leu, Met, Asn, Pro, Gln, Arg, Ser, Thr or Val
  MOD_RES (25)...(25): Xaa = Asp, Glu, Gly, Asn, Pro or Ser
  MOD_RES (26)...(26): Xaa = Ala, Asp, Glu, Phe, His, Leu, Met, Gln, Arg, Ser, Thr, Trp or Tyr
  MOD_RES (27)...(27): Xaa = Ala, Asp, Glu, Phe, Gly, His, Ile, Lys, Leu, Met, Asn, Gln, Arg, Ser, Thr, Val or Tyr
  MOD_RES (28)...(28): Xaa = Ala, Phe, Gly, Ile, Lys, Leu, Met, Pro, Gln, Arg, Ser, Thr, Val, Trp or Tyr
  MOD_RES (29)...(29): Xaa = Ala, Asp, Glu, Phe, Gly, His, Lys, Leu, Met, Asn, Pro, Gln, Arg, Ser, Thr, Val or Trp
  MOD_RES (30)...(30): Xaa = Ala, Asp, Glu, Gly, Ile, Lys, Leu, Met, Asn, Pro, Gln, Arg, Ser, Thr, Val or Tyr
  MOD_RES (31)...(31): Xaa = Ala, Asp, Glu, Phe, Gly, His, Ile, Lys, Leu, Met, Asn, Gln, Ser, Thr or Val
  MOD_RES (32)...(32): Xaa = Glu, Phe, Gly, His, Ile, Lys, Leu, Met, Asn, Pro, Gln, Arg, Ser, Thr or Trp
  MOD_RES (33)...(33): Xaa = Ala, Asp, Glu, Phe, Gly, His, Lys, Leu, Met, Asn, Pro, Gln, Arg, Ser, Thr, Val or Tyr
  MOD_RES (34)...(34): Xaa = Ala, Asp, Glu, Phe, Gly, His, Ile, Lys, Met, Asn, Gln, Arg, Ser, Thr, Val or Tyr
CXXXXCXXXCXXXXXXXXXCXCXXXXXXXXXXXXC

SEQ ID NO: 263 - protein, 32 aa, Artificial Sequence
  EGF domain monomer sequence
  MOD_RES (2)...(2): Xaa = Ala, Asp, Glu, Gly, Ile, Lys, Leu, Gln, Arg, Ser, Thr or Val
  MOD_RES (3)...(3): Xaa = Ala, Asp, Glu, Phe, Gly, His, Ile, Lys, Leu, Met, Asn, Pro, Gln, Arg, Ser, Thr or Val
  MOD_RES (4)...(4): Xaa = Ala, Glu, Phe, Gly, His, Leu, Asn, Pro, Gln, Arg, Ser, Thr, Trp or Tyr
  MOD_RES (5)...(5): Xaa = Ala, Asp, Glu, Phe, Gly, His, Ile, Lys, Leu, Asn, Pro, Arg, Ser or Thr
  MOD_RES (6)...(6): Xaa = Ala, Phe, Gly, Ile, Lys, Leu, Met, Asn, Pro, Gln, Arg, Ser, Thr, Val or Tyr
  MOD_RES (8)...(8): Xaa = Ala, Asp, Glu, Phe, Gly, His, Ile, Lys, Leu, Met, Asn, Pro, Gln, Arg, Ser, Thr or Val
  MOD_RES (9)...(9): Xaa = Ala, Asp, Glu, Phe, Gly, His, Lys, Leu, Asn, Pro, Gln, Arg, Ser, Thr or Tyr
  MOD_RES (10)...(10): Xaa = Ala, Gly or Thr
  MOD_RES (11)...(11): Xaa = Ala, Asp, Glu, Phe, His, Ile, Lys, Leu, Met, Asn, Gln, Arg, Ser, Thr or Val
  MOD_RES (13)...(13): Xaa = Ala, Asp, Glu, Phe, Gly, His, Ile, Lys, Leu, Met, Asn, Gln, Arg, Ser, Thr, Val, Trp or Tyr
  MOD_RES (14)...(14): Xaa = Ala, Asp, Glu, Lys, Leu, Asn, Pro, Gln, Arg, Ser, Thr or Val
  MOD_RES (15)...(15): Xaa = Ala, Cys, Asp, Glu, Phe, Gly, His, Ile, Lys, Leu, Met, Asn, Pro, Gln, Arg, Ser, Thr, Val or Tyr
  MOD_RES (16)...(16): Xaa = Ala, Asp, Glu, Phe, Gly, His, Ile, Lys, Leu, Met, Asn, Pro, Gln, Arg, Ser, Thr, Val, Trp or Tyr
  MOD_RES (17)...(17): Xaa = Ala, Asp, Glu, Phe, Gly, His, Ile, Lys, Leu, Asn, Pro, Gln, Arg, Ser, Thr, Val or Trp
  MOD_RES (18)...(18): Xaa = Ala, Asp, Glu, Gly, His, Lys, Leu, Met, Asn, Gln, Arg, Ser, Thr, Val, Trp or Tyr
  MOD_RES (19)...(19): Xaa = Ala, Phe, His, Ile, Leu, Pro, Arg, Thr, Val or Tyr
  MOD_RES (20)...(20): Xaa = Ala, Asp, Glu, Phe, His, Ile, Lys, Leu, Met, Asn, Gln, Arg, Ser, Thr, Val, Trp or Tyr
  MOD_RES (22)...(22): Xaa = Ala, Asp, Glu, Phe, Gly, His, Ile, Lys, Leu, Met, Asn, Pro, Gln, Arg, Ser, Thr, Val, Trp or Tyr
  MOD_RES (24)...(24): Xaa = Ala, Asp, Glu, Phe, His, Lys, Leu, Met, Asn, Pro, Gln, Arg, Ser, Thr, Val, Trp or Tyr
  MOD_RES (25)...(25): Xaa = Ala, Asp, Glu, Phe, Gly, His, Lys, Leu, Asn, Pro, Gln, Arg, Ser, Thr, Val or Tyr
  MOD_RES (26)...(26): Xaa = Ala, Glu, Gly, His, Lys, Leu, Asn, Pro, Arg, Ser, Thr or Tyr
  MOD_RES (27)...(27): Xaa = Phe, His, Ile, Leu, Met, Arg, Thr, Trp or Tyr
  MOD_RES (28)...(28): Xaa = Ala, Asp, Glu, Phe, Gly, His, Ile, Lys, Leu, Met, Asn, Gln, Arg, Ser, Thr, Val or Tyr
  MOD_RES (29)...(29): Xaa = Asp, Gly or Ser
  MOD_RES (30)...(30): Xaa = Ala, Asp, Glu, Phe, His, Ile, Lys, Leu, Asn, Pro, Gln, Arg, Ser, Thr, Val or Tyr
  MOD_RES (31)...(31): Xaa = Ala, Asp, Glu, Phe, His, Ile, Lys, Leu, Met, Asn, Gln, Arg, Ser, Thr or Tyr
CXXXXXCXXXXCXXXXXXXXCXCXXXXXXXXC

SEQ ID NO: 264 - protein, 33 aa, Artificial Sequence
  EGF domain monomer sequence
  MOD_RES (2)...(2): Xaa = Ala, Asp, Glu, Gly, Ile, Lys, Leu, Gln, Arg, Ser, Thr or Val
  MOD_RES (3)...(3): Xaa = Ala, Asp, Glu, Phe, Gly, His, Ile, Lys, Leu, Met, Asn, Pro, Gln, Arg, Ser, Thr or Val
  MOD_RES (4)...(4): Xaa = Ala, Glu, Phe, Gly, His, Leu, Asn, Pro, Gln, Arg, Ser, Thr, Trp or Tyr
  MOD_RES (5)...(5): Xaa = Ala, Asp, Glu, Phe, Gly, His, Ile, Lys, Leu, Asn, Pro, Arg, Ser or Thr
  MOD_RES (6)...(6): Xaa = Ala, Phe, Gly, Ile, Lys, Leu, Met, Asn, Pro, Gln, Arg, Ser, Thr, Val or Tyr
  MOD_RES (8)...(8): Xaa = Ala, Asp, Glu, Phe, Gly, His, Ile, Lys, Leu, Met, Asn, Pro, Gln, Arg, Ser, Thr or Val
  MOD_RES (9)...(9): Xaa = Ala, Asp, Glu, Phe, Gly, His, Lys, Leu, Asn, Pro, Gln, Arg, Ser, Thr or Tyr
  MOD_RES (10)...(10): Xaa = Ala, Gly or Thr
  MOD_RES (11)...(11): Xaa = Ala, Asp, Glu, Phe, His, Ile, Lys, Leu, Met, Asn, Gln, Arg, Ser, Thr or Val
  MOD_RES (13)...(13): Xaa = Ala, Asp, Glu, Phe, Gly, His, Ile, Lys, Leu, Met, Asn, Gln, Arg, Ser, Thr, Val, Trp or Tyr
  MOD_RES (14)...(14): Xaa = Ala, Asp, Glu, Lys, Leu, Asn, Pro, Gln, Arg, Ser, Thr or Val
  MOD_RES (15)...(15): Xaa = Ala, Cys, Asp, Glu, Phe, Gly, His, Ile, Lys, Leu, Met, Asn, Pro, Gln, Arg, Ser, Thr, Val or Tyr
  MOD_RES (16)...(16): Xaa = Ala, Asp, Glu, Phe, Gly, His, Ile, Lys, Leu, Met, Asn, Pro, Gln, Arg, Ser, Thr, Val, Trp or Tyr
  MOD_RES (17)...(17): Xaa = Ala, Asp, Glu, Phe, Gly, His, Ile, Lys, Leu, Asn, Pro, Gln, Arg, Ser, Thr, Val or Trp
  MOD_RES (18)...(18): Xaa = Ala, Asp, Glu, Gly, His, Lys, Leu, Met, Asn, Gln, Arg, Ser, Thr, Val, Trp or Tyr
  MOD_RES (19)...(19): Xaa = Ala, Phe, His, Ile, Leu, Pro, Arg, Thr, Val or Tyr
  MOD_RES (20)...(20): Xaa = Ala, Asp, Glu, Phe, His, Ile, Lys, Leu, Met, Asn, Gln, Arg, Ser, Thr, Val, Trp or Tyr
  MOD_RES (22)...(22): Xaa = Ala, Asp, Glu, Phe, Gly, His, Ile, Lys, Leu, Met, Asn, Pro, Gln, Arg, Ser, Thr, Val, Trp or Tyr
  MOD_RES (24)...(24): Xaa = Ala, Asp, Glu, Phe, Gly, His, Ile, Lys, Leu, Asn, Pro, Gln, Arg, Ser, Thr, Val or Tyr
  MOD_RES (25)...(25): Xaa = Ala, Asp, Glu, Phe, His, Ile, Lys, Leu, Met, Asn, Pro, Gln, Arg, Ser, Thr or Val
  MOD_RES (26)...(26): Xaa = Asp, Glu, Gly, Asn, Pro or Ser
  MOD_RES (27)...(27): Xaa = Ala, Asp, Glu, Phe, His, Leu, Met, Gln, Arg, Ser, Thr, Trp or Tyr
  MOD_RES (28)...(28): Xaa = Ala, Asp, Glu, Phe, Gly, His, Ile, Lys, Leu, Met, Asn, Gln, Arg, Ser, Thr, Val or Tyr
  MOD_RES (29)...(29): Xaa = Ala, Phe, Gly, Ile, Lys, Leu, Met, Pro, Gln, Arg, Ser, Thr, Val, Trp or Tyr
  MOD_RES (30)...(30): Xaa = Ala, Asp, Glu, Phe, Gly, His, Lys, Leu, Met, Asn, Pro, Gln, Arg, Ser, Thr, Val or Trp
  MOD_RES (31)...(31): Xaa = Ala, Asp, Glu, Gly, Ile, Lys, Leu, Met, Asn, Pro, Gln, Arg, Ser, Thr, Val or Tyr
  MOD_RES (32)...(32): Xaa = Ala, Asp, Glu, Phe, Gly, His, Ile, Lys, Leu, Met, Asn, Gln, Ser, Thr or Val
CXXXXXCXXXXCXXXXXXXXCXCXXXXXXXXXC

SEQ ID NO: 265 - protein, 34 aa, Artificial Sequence
  EGF domain monomer sequence
  MOD_RES (2)...(2): Xaa = Ala, Asp, Glu, Gly, Ile, Lys, Leu, Gln, Arg, Ser, Thr or Val
  MOD_RES (3)...(3): Xaa = Ala, Asp, Glu, Phe, Gly, His, Ile, Lys, Leu, Met, Asn, Pro, Gln, Arg, Ser, Thr or Val
  MOD_RES (4)...(4): Xaa = Ala, Glu, Phe, Gly, His, Leu, Asn, Pro, Gln, Arg, Ser, Thr, Trp or Tyr
  MOD_RES (5)...(5): Xaa = Ala, Asp, Glu, Phe, Gly, His, Ile, Lys, Leu, Asn, Pro, Arg, Ser or Thr
  MOD_RES (6)...(6): Xaa = Ala, Phe, Gly, Ile, Lys, Leu, Met, Asn, Pro, Gln, Arg, Ser, Thr, Val or Tyr
  MOD_RES (8)...(8): Xaa = Ala, Asp, Glu, Phe, Gly, His, Ile, Lys, Leu, Met, Asn, Pro, Gln, Arg, Ser, Thr or Val
  MOD_RES (9)...(9): Xaa = Ala, Asp, Glu, Phe, Gly, His, Lys, Leu, Asn, Pro, Gln, Arg, Ser, Thr or Tyr
  MOD_RES (10)...(10): Xaa = Ala, Gly or Thr
  MOD_RES (11)...(11): Xaa = Ala, Asp, Glu, Phe, His, Ile, Lys, Leu, Met, Asn, Gln, Arg, Ser, Thr or Val
  MOD_RES (13)...(13): Xaa = Ala, Asp, Glu, Phe, Gly, His, Ile, Lys, Leu, Met, Asn, Gln, Arg, Ser, Thr, Val, Trp or Tyr
  MOD_RES (14)...(14): Xaa = Ala, Asp, Glu, Lys, Leu, Asn, Pro, Gln, Arg, Ser, Thr or Val
  MOD_RES (15)...(15): Xaa = Ala, Cys, Asp, Glu, Phe, Gly, His, Ile, Lys, Leu, Met, Asn, Pro, Gln, Arg, Ser, Thr, Val or Tyr
  MOD_RES (16)...(16): Xaa = Ala, Asp, Glu, Phe, Gly, His, Ile, Lys, Leu, Met, Asn, Pro, Gln, Arg, Ser, Thr, Val, Trp or Tyr
  MOD_RES (17)...(17): Xaa = Ala, Asp, Glu, Phe, Gly, His, Ile, Lys, Leu, Asn, Pro, Gln, Arg, Ser, Thr, Val or Trp
  MOD_RES (18)...(18): Xaa = Ala, Asp, Glu, Gly, His, Lys, Leu, Met, Asn, Gln, Arg, Ser, Thr, Val, Trp or Tyr
  MOD_RES (19)...(19): Xaa = Ala, Phe, His, Ile, Leu, Pro, Arg, Thr, Val or Tyr
  MOD_RES (20)...(20): Xaa = Ala, Asp, Glu, Phe, His, Ile, Lys, Leu, Met, Asn, Gln, Arg, Ser, Thr, Val, Trp or Tyr
  MOD_RES (22)...(22): Xaa = Ala, Asp, Glu, Phe, Gly, His, Ile, Lys, Leu, Met, Asn, Pro, Gln, Arg, Ser, Thr, Val, Trp or Tyr
  MOD_RES (24)...(24): Xaa = Ala, Asp, Glu, Phe, Gly, His, Ile, Lys, Leu, Asn, Pro, Gln, Arg, Ser, Thr, Val or Tyr
  MOD_RES (25)...(25): Xaa = Ala, Asp, Glu, Phe, His, Ile, Lys, Leu, Met, Asn, Pro, Gln, Arg, Ser, Thr or Val
  MOD_RES (26)...(26): Xaa = Asp, Glu, Gly, Asn, Pro or Ser
  MOD_RES (27)...(27): Xaa = Ala, Asp, Glu, Phe, His, Leu, Met, Gln, Arg, Ser, Thr, Trp or Tyr
  MOD_RES (28)...(28): Xaa = Ala, Asp, Glu, Phe, Gly, His, Ile, Lys, Leu, Met, Asn, Gln, Arg, Ser, Thr, Val or Tyr
  MOD_RES (29)...(29): Xaa = Ala, Phe, Gly, Ile, Lys, Leu, Met, Pro, Gln, Arg, Ser, Thr, Val, Trp or Tyr
  MOD_RES (30)...(30): Xaa = Ala, Asp, Glu, Phe, Gly, His, Lys, Leu, Met, Asn, Pro, Gln, Arg, Ser, Thr, Val or Trp
  MOD_RES (31)...(31): Xaa = Ala, Asp, Glu, Gly, Ile, Lys, Leu, Met, Asn, Pro, Gln, Arg, Ser, Thr, Val or Tyr
  MOD_RES (32)...(32): Xaa = Ala, Asp, Glu, Phe, Gly, His, Ile, Lys, Leu, Met, Asn, Gln, Ser, Thr or Val
  MOD_RES (33)...(33): Xaa = Glu, Phe, Gly, His, Ile, Lys, Leu, Met, Asn, Pro, Gln, Arg, Ser, Thr or Trp
CXXXXXCXXXXCXXXXXXXXCXCXXXXXXXXXXC

SEQ ID NO: 266 - protein, 35 aa, Artificial Sequence
  EGF domain monomer sequence
  MOD_RES (2)...(2): Xaa = Ala, Asp, Glu, Gly, Ile, Lys, Leu, Gln, Arg, Ser, Thr or Val
  MOD_RES (3)...(3): Xaa = Ala, Asp, Glu, Phe, Gly, His, Ile, Lys, Leu, Met, Asn, Pro, Gln, Arg, Ser, Thr or Val
  MOD_RES (4)...(4): Xaa = Ala, Glu, Phe, Gly, His, Leu, Asn, Pro, Gln, Arg, Ser, Thr, Trp or Tyr
  MOD_RES (5)...(5): Xaa = Ala, Asp, Glu, Phe, Gly, His, Ile, Lys, Leu, Asn, Pro, Arg, Ser or Thr
  MOD_RES (6)...(6): Xaa = Ala, Phe, Gly, Ile, Lys, Leu, Met, Asn, Pro, Gln, Arg, Ser, Thr, Val or Tyr
  MOD_RES (8)...(8): Xaa = Ala, Asp, Glu, Phe, Gly, His, Ile, Lys, Leu, Met, Asn, Pro, Gln, Arg, Ser, Thr or Val
  MOD_RES (9)...(9): Xaa = Ala, Asp, Glu, Phe, Gly, His, Lys, Leu, Asn, Pro, Gln, Arg, Ser, Thr or Tyr
  MOD_RES (10)...(10): Xaa = Ala, Gly or Thr
  MOD_RES (11)...(11): Xaa = Ala, Asp, Glu, Phe, His, Ile, Lys, Leu, Met, Asn, Gln, Arg, Ser, Thr or Val
  MOD_RES (13)...(13): Xaa = Ala, Asp, Glu, Phe, Gly, His, Ile, Lys, Leu, Met, Asn, Gln, Arg, Ser, Thr, Val, Trp or Tyr
  MOD_RES (14)...(14): Xaa = Ala, Asp, Glu, Lys, Leu, Asn, Pro, Gln, Arg, Ser, Thr or Val
  MOD_RES (15)...(15): Xaa = Ala, Cys, Asp, Glu, Phe, Gly, His, Ile, Lys, Leu, Met, Asn, Pro, Gln, Arg, Ser, Thr, Val or Tyr
  MOD_RES (16)...(16): Xaa = Ala, Asp, Glu, Phe, Gly, His, Ile, Lys, Leu, Met, Asn, Pro, Gln, Arg, Ser, Thr, Val, Trp or Tyr
  MOD_RES (17)...(17): Xaa = Ala, Asp, Glu, Phe, Gly, His, Ile, Lys, Leu, Asn, Pro, Gln, Arg, Ser, Thr, Val or Trp
  MOD_RES (18)...(18): Xaa = Ala, Asp, Glu, Gly, His, Lys, Leu, Met, Asn, Gln, Arg, Ser, Thr, Val, Trp or Tyr
  MOD_RES (19)...(19): Xaa = Ala, Phe, His, Ile, Leu, Pro, Arg, Thr, Val or Tyr
  MOD_RES (20)...(20): Xaa = Ala, Asp, Glu, Phe, His, Ile, Lys, Leu, Met, Asn, Gln, Arg, Ser, Thr, Val, Trp or Tyr
  MOD_RES (22)...(22): Xaa = Ala, Asp, Glu, Phe, Gly, His, Ile, Lys, Leu, Met, Asn, Pro, Gln, Arg, Ser, Thr, Val, Trp or Tyr
  MOD_RES (24)...(24): Xaa = Ala, Asp, Glu, Phe, Gly, His, Ile, Lys, Leu, Asn, Pro, Gln, Arg, Ser, Thr, Val or Tyr
  MOD_RES (25)...(25): Xaa = Ala, Asp, Glu, Phe, His, Ile, Lys, Leu, Met, Asn, Pro, Gln, Arg, Ser, Thr or Val
  MOD_RES (26)...(26): Xaa = Asp, Glu, Gly, Asn, Pro or Ser
  MOD_RES (27)...(27): Xaa = Ala, Asp, Glu, Phe, His, Leu, Met, Gln, Arg, Ser, Thr, Trp or Tyr
  MOD_RES (28)...(28): Xaa = Ala, Asp, Glu, Phe, Gly, His, Ile, Lys, Leu, Met, Asn, Gln, Arg, Ser, Thr, Val or Tyr
  MOD_RES (29)...(29): Xaa = Ala, Phe, Gly, Ile, Lys, Leu, Met, Pro, Gln, Arg, Ser, Thr, Val, Trp or Tyr
  MOD_RES (30)...(30): Xaa = Ala, Asp, Glu, Phe, Gly, His, Lys, Leu, Met, Asn, Pro, Gln, Arg, Ser, Thr, Val or Trp
  MOD_RES (31)...(31): Xaa = Ala, Asp, Glu, Gly, Ile, Lys, Leu, Met, Asn, Pro, Gln, Arg, Ser, Thr, Val or Tyr
  MOD_RES (32)...(32): Xaa = Ala, Asp, Glu, Phe, Gly, His, Ile, Lys, Leu, Met, Asn, Gln, Ser, Thr or Val
  MOD_RES (33)...(33): Xaa = Glu, Phe, Gly, His, Ile, Lys, Leu, Met, Asn, Pro, Gln, Arg, Ser, Thr or Trp
  MOD_RES (34)...(34): Xaa = Ala, Asp, Glu, Phe, Gly, His, Lys, Leu, Met, Asn, Pro, Gln, Arg, Ser, Thr, Val or Tyr
CXXXXXCXXXXCXXXXXXXXCXCXXXXXXXXXXXC

SEQ ID NO: 267 - protein, 36 aa, Artificial Sequence
  EGF domain monomer sequence
  MOD_RES (2)...(2): Xaa = Ala, Asp, Glu, Gly, Ile, Lys, Leu, Gln, Arg, Ser, Thr or Val
  MOD_RES (3)...(3): Xaa = Ala, Asp, Glu, Phe, Gly, His, Ile, Lys, Leu, Met, Asn, Pro, Gln, Arg, Ser, Thr or Val
  MOD_RES (4)...(4): Xaa = Ala, Glu, Phe, Gly, His, Leu, Asn, Pro, Gln, Arg, Ser, Thr, Trp or Tyr
  MOD_RES (5)...(5): Xaa = Ala, Asp, Glu, Phe, Gly, His, Ile, Lys, Leu, Asn, Pro, Arg, Ser or Thr
  MOD_RES (6)...(6): Xaa = Ala, Phe, Gly, Ile, Lys, Leu, Met, Asn, Pro, Gln, Arg, Ser, Thr, Val or Tyr
  MOD_RES (8)...(8): Xaa = Ala, Asp, Glu, Phe, Gly, His, Ile, Lys, Leu, Met, Asn, Pro, Gln, Arg, Ser, Thr or Val
  MOD_RES (9)...(9): Xaa = Ala, Asp, Glu, Phe, Gly, His, Lys, Leu, Asn, Pro, Gln, Arg, Ser, Thr or Tyr
  MOD_RES (10)...(10): Xaa = Ala, Gly or Thr
  MOD_RES (11)...(11): Xaa = Ala, Asp, Glu, Phe, His, Ile, Lys, Leu, Met, Asn, Gln, Arg, Ser, Thr or Val
  MOD_RES (13)...(13): Xaa = Ala, Asp, Glu, Phe, Gly, His, Ile, Lys, Leu, Met, Asn, Gln, Arg, Ser, Thr, Val, Trp or Tyr
  MOD_RES (14)...(14): Xaa = Ala, Asp, Glu, Lys, Leu, Asn, Pro, Gln, Arg, Ser, Thr or Val
  MOD_RES (15)...(15): Xaa = Ala, Cys, Asp, Glu, Phe, Gly, His, Ile, Lys, Leu, Met, Asn, Pro, Gln, Arg, Ser, Thr, Val or Tyr
  MOD_RES (16)...(16): Xaa = Ala, Asp, Glu, Phe, Gly, His, Ile, Lys, Leu, Met, Asn, Pro, Gln, Arg, Ser, Thr, Val, Trp or Tyr
  MOD_RES (17)...(17): Xaa = Ala, Asp, Glu, Phe, Gly, His, Ile, Lys, Leu, Asn, Pro, Gln, Arg, Ser, Thr, Val or Trp
  MOD_RES (18)...(18): Xaa = Ala, Asp, Glu, Gly, His, Lys, Leu, Met, Asn, Gln, Arg, Ser, Thr, Val, Trp or Tyr
  MOD_RES (19)...(19): Xaa = Ala, Phe, His, Ile, Leu, Pro, Arg, Thr, Val or Tyr
  MOD_RES (20)...(20): Xaa = Ala, Asp, Glu, Phe, His, Ile, Lys, Leu, Met, Asn, Gln, Arg, Ser, Thr, Val, Trp or Tyr
  MOD_RES (22)...(22): Xaa = Ala, Asp, Glu, Phe, Gly, His, Ile, Lys, Leu, Met, Asn, Pro, Gln, Arg, Ser, Thr, Val, Trp or Tyr
  MOD_RES (24)...(24): Xaa = Ala, Asp, Glu, Phe, Gly, His, Ile, Lys, Leu, Asn, Pro, Gln, Arg, Ser, Thr, Val or Tyr
  MOD_RES (25)...(25): Xaa = Ala, Asp, Glu, Phe, His, Ile, Lys, Leu, Met, Asn, Pro, Gln, Arg, Ser, Thr or Val
  MOD_RES (26)...(26): Xaa = Asp, Glu, Gly, Asn, Pro or Ser
  MOD_RES (27)...(27): Xaa = Ala, Asp, Glu, Phe, His, Leu, Met, Gln, Arg, Ser, Thr, Trp or Tyr
  MOD_RES (28)...(28): Xaa = Ala, Asp, Glu, Phe, Gly, His, Ile, Lys, Leu, Met, Asn, Gln, Arg, Ser, Thr, Val or Tyr
  MOD_RES (29)...(29): Xaa = Ala, Phe, Gly, Ile, Lys, Leu, Met, Pro, Gln, Arg, Ser, Thr, Val, Trp or Tyr
  MOD_RES (30)...(30): Xaa = Ala, Asp, Glu, Phe, Gly, His, Lys, Leu, Met, Asn, Pro, Gln, Arg, Ser, Thr, Val or Trp
  MOD_RES (31)...(31): Xaa = Ala, Asp, Glu, Gly, Ile, Lys, Leu, Met, Asn, Pro, Gln, Arg, Ser, Thr, Val or Tyr
  MOD_RES (32)...(32): Xaa = Ala, Asp, Glu, Phe, Gly, His, Ile, Lys, Leu, Met, Asn, Gln, Ser, Thr or Val
  MOD_RES (33)...(33): Xaa = Glu, Phe, Gly, His, Ile, Lys, Leu, Met, Asn, Pro, Gln, Arg, Ser, Thr or Trp
  MOD_RES (34)...(34): Xaa = Ala, Asp, Glu, Phe, Gly, His, Lys, Leu, Met, Asn, Pro, Gln, Arg, Ser, Thr, Val or Tyr
  MOD_RES (35)...(35): Xaa = Ala, Asp, Glu, Phe, Gly, His, Ile, Lys, Met, Asn, Gln, Arg, Ser, Thr, Val or Tyr
CXXXXXCXXXXCXXXXXXXXCXCXXXXXXXXXXXXC

SEQ ID NO: 268 - protein, 33 aa, Artificial Sequence
  EGF domain monomer sequence
  MOD_RES (2)...(2): Xaa = Ala, Asp, Glu, Phe, Gly, Ile, Lys, Leu, Met, Asn, Pro, Gln, Arg, Ser, Thr, Val or Tyr
  MOD_RES (3)...(3): Xaa = Ala, Asp, Glu, Phe, Gly, His, Ile, Lys, Leu, Met, Asn, Pro, Gln, Arg, Ser, Thr, Val or Tyr
  MOD_RES (4)...(4): Xaa = Ala, Asp, Glu, Phe, Gly, His, Ile, Lys, Leu, Met, Asn, Pro, Gln, Arg, Ser, Thr, Val or Trp
  MOD_RES (5)...(5): Xaa = Ala, Asp, Glu, Phe, Gly, His, Ile, Lys, Leu, Met, Asn, Pro, Gln, Arg, Ser, Thr or Val
  MOD_RES (6)...(6): Xaa = Ala, Asp, Glu, Phe, Gly, His, Ile, Lys, Leu, Asn, Pro, Gln, Arg, Ser, Val or Tyr
  MOD_RES (7)...(7): Xaa = Ala, Asp, Glu, Gly, Ile, Lys, Leu, Met, Asn, Pro, Gln, Arg, Ser, Thr, Val or Tyr
  MOD_RES (9)...(9): Xaa = Ala, Asp, Glu, Phe, Gly, His, Ile, Lys, Leu, Met, Asn, Pro, Gln, Arg, Ser, Thr or Val
  MOD_RES (10)...(10): Xaa = Ala, Asp, Glu, Phe, Gly, His, Lys, Leu, Asn, Pro, Gln, Arg, Ser, Thr or Tyr
  MOD_RES (11)...(11): Xaa = Ala, Gly or Thr
  MOD_RES (12)...(12): Xaa = Ala, Asp, Glu, Phe, His, Ile, Lys, Leu, Met, Asn, Gln, Arg, Ser, Thr or Val
  MOD_RES (14)...(14): Xaa = Ala, Asp, Glu, Phe, Gly, His, Ile, Lys, Leu, Met, Asn, Gln, Arg, Ser, Thr, Val, Trp or Tyr
  MOD_RES (15)...(15): Xaa = Ala, Asp, Glu, Lys, Leu, Asn, Pro, Gln, Arg, Ser, Thr or Val
  MOD_RES (16)...(16): Xaa = Ala, Cys, Asp, Glu, Phe, Gly, His, Ile, Lys, Leu, Met, Asn, Pro, Gln, Arg, Ser, Thr, Val or Tyr
  MOD_RES (17)...(17): Xaa = Ala, Asp, Glu, Phe, Gly, His, Ile, Lys, Leu, Met, Asn, Pro, Gln, Arg, Ser, Thr, Val, Trp or Tyr
  MOD_RES (18)...(18): Xaa = Ala, Asp, Glu, Phe, Gly, His, Ile, Lys, Leu, Asn, Pro, Gln, Arg, Ser, Thr, Val or Trp
  MOD_RES (19)...(19): Xaa = Ala, Asp, Glu, Gly, His, Lys, Leu, Met, Asn, Gln, Arg, Ser, Thr, Val, Trp or Tyr
  MOD_RES (20)...(20): Xaa = Ala, Phe, His, Ile, Leu, Pro, Arg, Thr, Val or Tyr
  MOD_RES (21)...(21): Xaa = Ala, Asp, Glu, Phe, His, Ile, Lys, Leu, Met, Asn, Gln, Arg, Ser, Thr, Val, Trp or Tyr
  MOD_RES (23)...(23): Xaa = Ala, Asp, Glu, Phe, Gly, His, Ile, Lys, Leu, Met, Asn, Pro, Gln, Arg, Ser, Thr, Val, Trp or Tyr
  MOD_RES (25)...(25): Xaa = Ala, Asp, Glu, Phe, His, Lys, Leu, Met, Asn, Pro, Gln, Arg, Ser, Thr, Val, Trp or Tyr
  MOD_RES (26)...(26): Xaa = Ala, Asp, Glu, Phe, Gly, His, Lys, Leu, Asn, Pro, Gln, Arg, Ser, Thr, Val or Tyr
  MOD_RES (27)...(27): Xaa = Ala, Glu, Gly, His, Lys, Leu, Asn, Pro, Arg, Ser, Thr or Tyr
  MOD_RES (28)...(28): Xaa = Phe, His, Ile, Leu, Met, Arg, Thr, Trp or Tyr
  MOD_RES (29)...(29): Xaa = Ala, Asp, Glu, Phe, Gly, His, Ile, Lys, Leu, Met, Asn, Gln, Arg, Ser, Thr, Val or Tyr
  MOD_RES (30)...(30): Xaa = Asp, Gly or Ser
  MOD_RES (31)...(31): Xaa = Ala, Asp, Glu, Phe, His, Ile, Lys, Leu, Asn, Pro, Gln, Arg, Ser, Thr, Val or Tyr
  MOD_RES (32)...(32): Xaa = Ala, Asp, Glu, Phe, His, Ile, Lys, Leu, Met, Asn, Gln, Arg, Ser, Thr or Tyr
CXXXXXXCXXXXCXXXXXXXXCXCXXXXXXXXC

SEQ ID NO: 269 - protein, 34 aa, Artificial Sequence
  EGF domain monomer sequence
  MOD_RES (2)...(2): Xaa = Ala, Asp, Glu, Phe, Gly, Ile, Lys, Leu, Met, Asn, Pro, Gln, Arg, Ser, Thr, Val or Tyr
  MOD_RES (3)...(3): Xaa = Ala, Asp, Glu, Phe, Gly, His, Ile, Lys, Leu, Met, Asn, Pro, Gln, Arg, Ser, Thr, Val or Tyr
  MOD_RES (4)...(4): Xaa = Ala, Asp, Glu, Phe, Gly, His, Ile, Lys, Leu, Met, Asn, Pro, Gln, Arg, Ser, Thr, Val or Trp
  MOD_RES (5)...(5): Xaa = Ala, Asp, Glu, Phe, Gly, His, Ile, Lys, Leu, Met, Asn, Pro, Gln, Arg, Ser, Thr or Val
  MOD_RES (6)...(6): Xaa = Ala, Asp, Glu, Phe, Gly, His, Ile, Lys, Leu, Asn, Pro, Gln, Arg, Ser, Val or Tyr
  MOD_RES (7)...(7): Xaa = Ala, Asp, Glu, Gly, Ile, Lys, Leu, Met, Asn, Pro, Gln, Arg, Ser, Thr, Val or Tyr
  MOD_RES (9)...(9): Xaa = Ala, Asp, Glu, Phe, Gly, His, Ile, Lys, Leu, Met, Asn, Pro, Gln, Arg, Ser, Thr or Val
  MOD_RES (10)...(10): Xaa = Ala, Asp, Glu, Phe, Gly, His, Lys, Leu, Asn, Pro, Gln, Arg, Ser, Thr or Tyr
  MOD_RES (11)...(11): Xaa = Ala, Gly or Thr
  MOD_RES (12)...(12): Xaa = Ala, Asp, Glu, Phe, His, Ile, Lys, Leu, Met, Asn, Gln, Arg, Ser, Thr or Val
  MOD_RES (14)...(14): Xaa = Ala, Asp, Glu, Phe, Gly, His, Ile, Lys, Leu, Met, Asn, Gln, Arg, Ser, Thr, Val, Trp or Tyr
  MOD_RES (15)...(15): Xaa = Ala, Asp, Glu, Lys, Leu, Asn, Pro, Gln, Arg, Ser, Thr or Val
  MOD_RES (16)...(16): Xaa = Ala, Cys, Asp, Glu, Phe, Gly, His, Ile, Lys, Leu, Met, Asn, Pro, Gln, Arg, Ser, Thr, Val or Tyr
  MOD_RES (17)...(17): Xaa = Ala, Asp, Glu, Phe, Gly, His, Ile, Lys, Leu, Met, Asn, Pro, Gln, Arg, Ser, Thr, Val, Trp or Tyr
  MOD_RES (18)...(18): Xaa = Ala, Asp, Glu, Phe, Gly, His, Ile, Lys, Leu, Asn, Pro, Gln, Arg, Ser, Thr, Val or Trp
  MOD_RES (19)...(19): Xaa = Ala, Asp, Glu, Gly, His, Lys, Leu, Met, Asn, Gln, Arg, Ser, Thr, Val, Trp or Tyr
  MOD_RES (20)...(20): Xaa = Ala, Phe, His, Ile, Leu, Pro, Arg, Thr, Val or Tyr
  MOD_RES (21)...(21): Xaa = Ala, Asp, Glu, Phe, His, Ile, Lys, Leu, Met, Asn, Gln, Arg, Ser, Thr, Val, Trp or Tyr
  MOD_RES (23)...(23): Xaa = Ala, Asp, Glu, Phe, Gly, His, Ile, Lys, Leu, Met, Asn, Pro, Gln, Arg, Ser, Thr, Val, Trp or Tyr
  MOD_RES (25)...(25): Xaa = Ala, Asp, Glu, Phe, Gly, His, Ile, Lys, Leu, Asn, Pro, Gln, Arg, Ser, Thr, Val or Tyr
  MOD_RES (26)...(26): Xaa = Ala, Asp, Glu, Phe, His, Ile, Lys, Leu, Met, Asn, Pro, Gln, Arg, Ser, Thr or Val
  MOD_RES (27)...(27): Xaa = Asp, Glu, Gly, Asn, Pro or Ser
  MOD_RES (28)...(28): Xaa = Ala, Asp, Glu, Phe, His, Leu, Met, Gln, Arg, Ser, Thr, Trp or Tyr
  MOD_RES (29)...(29): Xaa = Ala, Asp, Glu, Phe, Gly, His, Ile, Lys, Leu, Met, Asn, Gln, Arg, Ser, Thr, Val or Tyr
  MOD_RES (30)...(30): Xaa = Ala, Phe, Gly, Ile, Lys, Leu, Met, Pro, Gln, Arg, Ser, Thr, Val, Trp or Tyr
  MOD_RES (31)...(31): Xaa = Ala, Asp, Glu, Phe, Gly, His, Lys, Leu, Met, Asn, Pro, Gln, Arg, Ser, Thr, Val or Trp
  MOD_RES (32)...(32): Xaa = Ala, Asp, Glu, Gly, Ile, Lys, Leu, Met, Asn, Pro, Gln, Arg, Ser, Thr, Val or Tyr
  MOD_RES (33)...(33): Xaa = Ala, Asp, Glu, Phe, Gly, His, Ile, Lys, Leu, Met, Asn, Gln, Ser, Thr or Val
CXXXXXXCXXXXCXXXXXXXXCXCXXXXXXXXXC

SEQ ID NO: 270 - protein, 35 aa, Artificial Sequence
  EGF domain monomer sequence
  MOD_RES (2)...(2): Xaa = Ala, Asp, Glu, Phe, Gly, Ile, Lys, Leu, Met, Asn, Pro, Gln, Arg, Ser, Thr, Val or Tyr
  MOD_RES (3)...(3): Xaa = Ala, Asp, Glu, Phe, Gly, His, Ile, Lys, Leu, Met, Asn, Pro, Gln, Arg, Ser, Thr, Val or Tyr
  MOD_RES (4)...(4): Xaa = Ala, Asp, Glu, Phe, Gly, His, Ile, Lys, Leu, Met, Asn, Pro, Gln, Arg, Ser, Thr, Val or Trp
  MOD_RES (5)...(5): Xaa = Ala, Asp, Glu, Phe, Gly, His, Ile, Lys, Leu, Met, Asn, Pro, Gln, Arg, Ser, Thr or Val
  MOD_RES (6)...(6): Xaa = Ala, Asp, Glu, Phe, Gly, His, Ile, Lys, Leu, Asn, Pro, Gln, Arg, Ser, Val or Tyr
  MOD_RES (7)...(7): Xaa = Ala, Asp, Glu, Gly, Ile, Lys, Leu, Met, Asn, Pro, Gln, Arg, Ser, Thr, Val or Tyr
  MOD_RES (9)...(9): Xaa = Ala, Asp, Glu, Phe, Gly, His, Ile, Lys, Leu, Met, Asn, Pro, Gln, Arg, Ser, Thr or Val
  MOD_RES (10)...(10): Xaa = Ala, Asp, Glu, Phe, Gly, His, Lys, Leu, Asn, Pro, Gln, Arg, Ser, Thr or Tyr
  MOD_RES (11)...(11): Xaa = Ala, Gly or Thr
  MOD_RES (12)...(12): Xaa = Ala, Asp, Glu, Phe, His, Ile, Lys, Leu, Met, Asn, Gln, Arg, Ser, Thr or Val
  MOD_RES (14)...(14): Xaa = Ala, Asp, Glu, Phe, Gly, His, Ile, Lys, Leu, Met, Asn, Gln, Arg, Ser, Thr, Val, Trp or Tyr
  MOD_RES (15)...(15): Xaa = Ala, Asp, Glu, Lys, Leu, Asn, Pro, Gln, Arg, Ser, Thr or Val
  MOD_RES (16)...(16): Xaa = Ala, Cys, Asp, Glu, Phe, Gly, His, Ile, Lys, Leu, Met, Asn, Pro, Gln, Arg, Ser, Thr, Val or Tyr
  MOD_RES (17)...(17): Xaa = Ala, Asp, Glu, Phe, Gly, His, Ile, Lys, Leu, Met, Asn, Pro, Gln, Arg, Ser, Thr, Val, Trp or Tyr
  MOD_RES (18)...(18): Xaa = Ala, Asp, Glu, Phe, Gly, His, Ile, Lys, Leu, Asn, Pro, Gln, Arg, Ser, Thr, Val or Trp
  MOD_RES (19)...(19): Xaa = Ala, Asp, Glu, Gly, His, Lys, Leu, Met, Asn, Gln, Arg, Ser, Thr, Val, Trp or Tyr
  MOD_RES (20)...(20): Xaa = Ala, Phe, His, Ile, Leu, Pro, Arg, Thr, Val or Tyr
  MOD_RES (21)...(21): Xaa = Ala, Asp, Glu, Phe, His, Ile, Lys, Leu, Met, Asn, Gln, Arg, Ser, Thr, Val, Trp or Tyr
  MOD_RES (23)...(23): Xaa = Ala, Asp, Glu, Phe, Gly, His, Ile, Lys, Leu, Met, Asn, Pro, Gln, Arg, Ser, Thr, Val, Trp or Tyr
  MOD_RES (25)...(25): Xaa = Ala, Asp, Glu, Phe, Gly, His, Ile, Lys, Leu, Asn, Pro, Gln, Arg, Ser, Thr, Val or Tyr
  MOD_RES (26)...(26): Xaa = Ala, Asp, Glu, Phe, His, Ile, Lys, Leu, Met, Asn, Pro, Gln, Arg, Ser, Thr or Val
  MOD_RES (27)...(27): Xaa = Asp, Glu, Gly, Asn, Pro or Ser
  MOD_RES (28)...(28): Xaa = Ala, Asp, Glu, Phe, His, Leu, Met, Gln, Arg, Ser, Thr, Trp or Tyr
  MOD_RES (29)...(29): Xaa = Ala, Asp, Glu, Phe, Gly, His, Ile, Lys, Leu, Met, Asn, Gln, Arg, Ser, Thr, Val or Tyr
  MOD_RES (30)...(30): Xaa = Ala, Phe, Gly, Ile, Lys, Leu, Met, Pro, Gln, Arg, Ser, Thr, Val, Trp or Tyr
  MOD_RES (31)...(31): Xaa = Ala, Asp, Glu, Phe, Gly, His, Lys, Leu, Met, Asn, Pro, Gln, Arg, Ser, Thr, Val or Trp
  MOD_RES (32)...(32): Xaa = Ala, Asp, Glu, Gly, Ile, Lys, Leu, Met, Asn, Pro, Gln, Arg, Ser, Thr, Val or Tyr
  MOD_RES (33)...(33): Xaa = Ala, Asp, Glu, Phe, Gly, His, Ile, Lys, Leu, Met, Asn, Gln, Ser, Thr or Val
  MOD_RES (34)...(34): Xaa = Glu, Phe, Gly, His, Ile, Lys, Leu, Met, Asn, Pro, Gln, Arg, Ser, Thr or Trp
CXXXXXXCXXXXCXXXXXXXXCXCXXXXXXXXXXC

SEQ ID NO: 271 - protein, 36 aa, Artificial Sequence
  EGF domain monomer sequence
  MOD_RES (2)...(2): Xaa = Ala, Asp, Glu, Phe, Gly, Ile, Lys, Leu, Met, Asn, Pro, Gln, Arg, Ser, Thr, Val or Tyr
  MOD_RES (3)...(3): Xaa = Ala, Asp, Glu, Phe, Gly, His, Ile, Lys, Leu, Met, Asn, Pro, Gln, Arg, Ser, Thr, Val or Tyr
  MOD_RES (4)...(4): Xaa = Ala, Asp, Glu, Phe, Gly, His, Ile, Lys, Leu, Met, Asn, Pro, Gln, Arg, Ser, Thr, Val or Trp
  MOD_RES (5)...(5): Xaa = Ala, Asp, Glu, Phe, Gly, His, Ile, Lys, Leu, Met, Asn, Pro, Gln, Arg, Ser, Thr or Val
  MOD_RES (6)...(6): Xaa = Ala, Asp, Glu, Phe, Gly, His, Ile, Lys, Leu, Asn, Pro, Gln, Arg, Ser, Val or Tyr
  MOD_RES (7)...(7): Xaa = Ala, Asp, Glu, Gly, Ile, Lys, Leu, Met, Asn, Pro, Gln, Arg, Ser, Thr, Val or Tyr
  MOD_RES (9)...(9): Xaa = Ala, Asp, Glu, Phe, Gly, His, Ile, Lys, Leu, Met, Asn, Pro, Gln, Arg, Ser, Thr or Val
  MOD_RES (10)...(10): Xaa = Ala, Asp, Glu, Phe, Gly, His, Lys, Leu, Asn, Pro, Gln, Arg, Ser, Thr or Tyr
  MOD_RES (11)...(11): Xaa = Ala, Gly or Thr
  MOD_RES (12)...(12): Xaa = Ala, Asp, Glu, Phe, His, Ile, Lys, Leu, Met, Asn, Gln, Arg, Ser, Thr or Val
  MOD_RES (14)...(14): Xaa = Ala, Asp, Glu, Phe, Gly, His, Ile, Lys, Leu, Met, Asn, Gln, Arg, Ser, Thr, Val, Trp or Tyr
  MOD_RES (15)...(15): Xaa = Ala, Asp, Glu, Lys, Leu, Asn, Pro, Gln, Arg, Ser, Thr or Val
  MOD_RES (16)...(16): Xaa = Ala, Cys, Asp, Glu, Phe, Gly, His, Ile, Lys, Leu, Met, Asn, Pro, Gln, Arg, Ser, Thr, Val or Tyr
  MOD_RES (17)...(17): Xaa = Ala, Asp, Glu, Phe, Gly, His, Ile, Lys, Leu, Met, Asn, Pro, Gln, Arg, Ser, Thr, Val, Trp or Tyr
  MOD_RES (18)...(18): Xaa = Ala, Asp, Glu, Phe, Gly, His, Ile, Lys, Leu, Asn, Pro, Gln, Arg, Ser, Thr, Val or Trp
  MOD_RES (19)...(19): Xaa = Ala, Asp, Glu, Gly, His, Lys, Leu, Met, Asn, Gln, Arg, Ser, Thr, Val, Trp or Tyr
  MOD_RES (20)...(20): Xaa = Ala, Phe, His, Ile, Leu, Pro, Arg, Thr, Val or Tyr
  MOD_RES (21)...(21): Xaa = Ala, Asp, Glu, Phe, His, Ile, Lys, Leu, Met, Asn, Gln, Arg, Ser, Thr, Val, Trp or Tyr
  MOD_RES (23)...(23): Xaa = Ala, Asp, Glu, Phe, Gly, His, Ile, Lys, Leu, Met, Asn, Pro, Gln, Arg, Ser, Thr, Val, Trp or Tyr
  MOD_RES (25)...(25): Xaa = Ala, Asp, Glu, Phe, Gly, His, Ile, Lys, Leu, Asn, Pro, Gln, Arg, Ser, Thr, Val or Tyr
  MOD_RES (26)...(26): Xaa = Ala, Asp, Glu, Phe, His, Ile, Lys, Leu, Met, Asn, Pro, Gln, Arg, Ser, Thr or Val
  MOD_RES (27)...(27): Xaa = Asp, Glu, Gly, Asn, Pro or Ser
  MOD_RES (28)...(28): Xaa = Ala, Asp, Glu, Phe, His, Leu, Met, Gln, Arg, Ser, Thr, Trp or Tyr
  MOD_RES (29)...(29): Xaa = Ala, Asp, Glu, Phe, Gly, His, Ile, Lys, Leu, Met, Asn, Gln, Arg, Ser, Thr, Val or Tyr
  MOD_RES (30)...(30): Xaa = Ala, Phe, Gly, Ile, Lys, Leu, Met, Pro, Gln, Arg, Ser, Thr, Val, Trp or Tyr
  MOD_RES (31)...(31): Xaa = Ala, Asp, Glu, Phe, Gly, His, Lys, Leu, Met, Asn, Pro, Gln, Arg, Ser, Thr, Val or Trp
  MOD_RES (32)...(32): Xaa = Ala, Asp, Glu, Gly, Ile, Lys, Leu, Met, Asn, Pro, Gln, Arg, Ser, Thr, Val or Tyr
  MOD_RES (33)...(33): Xaa = Ala, Asp, Glu, Phe, Gly, His, Ile, Lys, Leu, Met, Asn, Gln, Ser, Thr or Val
  MOD_RES (34)...(34): Xaa = Glu, Phe, Gly, His, Ile, Lys, Leu, Met, Asn, Pro, Gln, Arg, Ser, Thr or Trp
  MOD_RES (35)...(35): Xaa = Ala, Asp, Glu, Phe, Gly, His, Lys, Leu, Met, Asn, Pro, Gln, Arg, Ser, Thr, Val or Tyr
CXXXXXXCXXXXCXXXXXXXXCXCXXXXXXXXXXXC

SEQ ID NO: 272 - protein, 37 aa, Artificial Sequence
  EGF domain monomer sequence
  MOD_RES (2)...(2): Xaa = Ala, Asp, Glu, Phe, Gly, Ile, Lys, Leu, Met, Asn, Pro, Gln, Arg, Ser, Thr, Val or Tyr
  MOD_RES (3)...(3): Xaa = Ala, Asp, Glu, Phe, Gly, His, Ile, Lys, Leu, Met, Asn, Pro, Gln, Arg, Ser, Thr, Val or Tyr
  MOD_RES (4)...(4): Xaa = Ala, Asp, Glu, Phe, Gly, His, Ile, Lys, Leu, Met, Asn, Pro, Gln, Arg, Ser, Thr, Val or Trp
  MOD_RES (5)...(5): Xaa = Ala, Asp, Glu, Phe, Gly, His, Ile, Lys, Leu, Met, Asn, Pro, Gln, Arg, Ser, Thr or Val
  MOD_RES (6)...(6): Xaa = Ala, Asp, Glu, Phe, Gly, His, Ile, Lys, Leu, Asn, Pro, Gln, Arg, Ser, Val or Tyr
  MOD_RES (7)...(7): Xaa = Ala, Asp, Glu, Gly, Ile, Lys, Leu, Met, Asn, Pro, Gln, Arg, Ser, Thr, Val or Tyr
  MOD_RES (9)...(9): Xaa = Ala, Asp, Glu, Phe, Gly, His, Ile, Lys, Leu, Met, Asn, Pro, Gln, Arg, Ser, Thr or Val
  MOD_RES (10)...(10): Xaa = Ala, Asp, Glu, Phe, Gly, His, Lys, Leu, Asn, Pro, Gln, Arg, Ser, Thr or Tyr
  MOD_RES (11)...(11): Xaa = Ala, Gly or Thr
  MOD_RES (12)...(12): Xaa = Ala, Asp, Glu, Phe, His, Ile, Lys, Leu, Met, Asn, Gln, Arg, Ser, Thr or Val
  MOD_RES (14)...(14): Xaa = Ala, Asp, Glu, Phe, Gly, His, Ile, Lys, Leu, Met, Asn, Gln, Arg, Ser, Thr, Val, Trp or Tyr
  MOD_RES (15)...(15): Xaa = Ala, Asp, Glu, Lys, Leu, Asn, Pro, Gln, Arg, Ser, Thr or Val
  MOD_RES (16)...(16): Xaa = Ala, Cys, Asp, Glu, Phe, Gly, His, Ile, Lys, Leu, Met, Asn, Pro, Gln, Arg, Ser, Thr, Val or Tyr
  MOD_RES (17)...(17): Xaa = Ala, Asp, Glu, Phe, Gly, His, Ile, Lys, Leu, Met, Asn, Pro, Gln, Arg, Ser, Thr, Val, Trp or Tyr
  MOD_RES (18)...(18): Xaa = Ala, Asp, Glu, Phe, Gly, His, Ile, Lys, Leu, Asn, Pro, Gln, Arg, Ser, Thr, Val or Trp
  MOD_RES (19)...(19): Xaa = Ala, Asp, Glu, Gly, His, Lys, Leu, Met, Asn, Gln, Arg, Ser, Thr, Val, Trp or Tyr
  MOD_RES (20)...(20): Xaa = Ala, Phe, His, Ile, Leu, Pro, Arg, Thr, Val or Tyr
  MOD_RES (21)...(21): Xaa = Ala, Asp, Glu, Phe, His, Ile, Lys, Leu, Met, Asn, Gln, Arg, Ser, Thr, Val, Trp or Tyr
  MOD_RES (23)...(23): Xaa = Ala, Asp, Glu, Phe, Gly, His, Ile, Lys, Leu, Met, Asn, Pro, Gln, Arg, Ser, Thr, Val, Trp or Tyr
  MOD_RES (25)...(25): Xaa = Ala, Asp, Glu, Phe, Gly, His, Ile, Lys, Leu, Asn, Pro, Gln, Arg, Ser, Thr, Val or Tyr
  MOD_RES (26)...(26): Xaa = Ala, Asp, Glu, Phe, His, Ile, Lys, Leu, Met, Asn, Pro, Gln, Arg, Ser, Thr or Val
  MOD_RES (27)...(27): Xaa = Asp, Glu, Gly, Asn, Pro or Ser
  MOD_RES (28)...(28): Xaa = Ala, Asp, Glu, Phe, His, Leu, Met, Gln, Arg, Ser, Thr, Trp or Tyr
  MOD_RES (29)...(29): Xaa = Ala, Asp, Glu, Phe, Gly, His, Ile, Lys, Leu, Met, Asn, Gln, Arg, Ser, Thr, Val or Tyr
  MOD_RES (30)...(30): Xaa = Ala, Phe, Gly, Ile, Lys, Leu, Met, Pro, Gln, Arg, Ser, Thr, Val, Trp or Tyr
  MOD_RES (31)...(31): Xaa = Ala, Asp, Glu, Phe, Gly, His, Lys, Leu, Met, Asn, Pro, Gln, Arg, Ser, Thr, Val or Trp
  MOD_RES (32)...(32): Xaa = Ala, Asp, Glu, Gly, Ile, Lys, Leu, Met, Asn, Pro, Gln, Arg, Ser, Thr, Val or Tyr
  MOD_RES (33)...(33): Xaa = Ala, Asp, Glu, Phe, Gly, His, Ile, Lys, Leu, Met, Asn, Gln, Ser, Thr or Val
  MOD_RES (34)...(34): Xaa = Glu, Phe, Gly, His, Ile, Lys, Leu, Met, Asn, Pro, Gln, Arg, Ser, Thr or Trp
  MOD_RES (35)...(35): Xaa = Ala, Asp, Glu, Phe, Gly, His, Lys, Leu, Met, Asn, Pro, Gln, Arg, Ser, Thr, Val or Tyr
  MOD_RES (36)...(36): Xaa = Ala, Asp, Glu, Phe, Gly, His, Ile, Lys, Met, Asn, Gln, Arg, Ser, Thr, Val or Tyr
CXXXXXXCXXXXCXXXXXXXXCXCXXXXXXXXXXXXC

SEQ ID NO: 273 - protein, 33 aa, Artificial Sequence
  EGF domain monomer sequence
  MOD_RES (2)...(2): Xaa = Ala, Asp, Glu, Gly, Ile, Lys, Leu, Gln, Arg, Ser, Thr or Val
  MOD_RES (3)...(3): Xaa = Ala, Asp, Glu, Phe, Gly, His, Ile, Lys, Leu, Met, Asn, Pro, Gln, Arg, Ser, Thr or Val
  MOD_RES (4)...(4): Xaa = Ala, Glu, Phe, Gly, His, Leu, Asn, Pro, Gln, Arg, Ser, Thr, Trp or Tyr
  MOD_RES (5)...(5): Xaa = Ala, Asp, Glu, Phe, Gly, His, Ile, Lys, Leu, Asn, Pro, Arg, Ser or Thr
  MOD_RES (6)...(6): Xaa = Ala, Phe, Gly, Ile, Lys, Leu, Met, Asn, Pro, Gln, Arg, Ser, Thr, Val or Tyr
  MOD_RES (8)...(8): Xaa = Ala, Cys, Asp, Glu, Phe, Gly, His, Lys, Leu, Met, Asn, Pro, Gln, Arg, Ser, Val or Tyr
  MOD_RES (9)...(9): Xaa = Ala, Asp, Glu, Gly, His, Ile, Lys, Leu, Met, Asn, Pro, Gln, Arg, Ser, Thr, Val or Tyr
  MOD_RES (10)...(10): Xaa = Ala, Asp, Glu, Phe, Gly, His, Lys, Leu, Asn, Gln, Arg, Ser, Thr or Tyr
  MOD_RES (11)...(11): Xaa = Ala, Phe, Gly, His, Gln, Ser, Thr or Val
  MOD_RES (12)...(12): Xaa = Ala, Asp, Glu, Phe, His, Ile, Lys, Leu, Met, Asn, Gln, Arg, Ser, Thr or Val
  MOD_RES (14)...(14): Xaa = Ala, Asp, Glu, Phe, Gly, His, Ile, Lys, Leu, Met, Asn, Gln, Arg, Ser, Thr, Val, Trp or Tyr
  MOD_RES (15)...(15): Xaa = Ala, Asp, Glu, Lys, Leu, Asn, Pro, Gln, Arg, Ser, Thr or Val
  MOD_RES (16)...(16): Xaa = Ala, Cys, Asp, Glu, Phe, Gly, His, Ile, Lys, Leu, Met, Asn, Pro, Gln, Arg, Ser, Thr, Val or Tyr
  MOD_RES (17)...(17): Xaa = Ala, Asp, Glu, Phe, Gly, His, Ile, Lys, Leu, Met, Asn, Pro, Gln, Arg, Ser, Thr, Val, Trp or Tyr
  MOD_RES (18)...(18): Xaa = Ala, Asp, Glu, Phe, Gly, His, Ile, Lys, Leu, Asn, Pro, Gln, Arg, Ser, Thr, Val or Trp
  MOD_RES (19)...(19): Xaa = Ala, Asp, Glu, Gly, His, Lys, Leu, Met, Asn, Gln, Arg, Ser, Thr, Val, Trp or Tyr
  MOD_RES (20)...(20): Xaa = Ala, Phe, His, Ile, Leu, Pro, Arg, Thr, Val or Tyr
  MOD_RES (21)...(21): Xaa = Ala, Asp, Glu, Phe, His, Ile, Lys, Leu, Met, Asn, Gln, Arg, Ser, Thr, Val, Trp or Tyr
  MOD_RES (23)...(23): Xaa = Ala, Asp, Glu, Phe, Gly, His, Ile, Lys, Leu, Met, Asn, Pro, Gln, Arg, Ser, Thr, Val, Trp or Tyr
  MOD_RES (25)...(25): Xaa = Ala, Asp, Glu, Phe, His, Lys, Leu, Met, Asn, Pro, Gln, Arg, Ser, Thr, Val, Trp or Tyr
  MOD_RES (26)...(26): Xaa = Ala, Asp, Glu, Phe, Gly, His, Lys, Leu, Asn, Pro, Gln, Arg, Ser, Thr, Val or Tyr
  MOD_RES (27)...(27): Xaa = Ala, Glu, Gly, His, Lys, Leu, Asn, Pro, Arg, Ser, Thr or Tyr
  MOD_RES (28)...(28): Xaa = Phe, His, Ile, Leu, Met, Arg, Thr, Trp or Tyr
  MOD_RES (29)...(29): Xaa = Ala, Asp, Glu, Phe, Gly, His, Ile, Lys, Leu, Met, Asn, Gln, Arg, Ser, Thr, Val or Tyr
  MOD_RES (30)...(30): Xaa = Asp, Gly or Ser
  MOD_RES (31)...(31): Xaa = Ala, Asp, Glu, Phe, His, Ile, Lys, Leu, Asn, Pro, Gln, Arg, Ser, Thr, Val or Tyr
  MOD_RES (32)...(32): Xaa = Ala, Asp, Glu, Phe, His, Ile, Lys, Leu, Met, Asn, Gln, Arg, Ser, Thr or Tyr
CXXXXXCXXXXXCXXXXXXXXCXCXXXXXXXXC

SEQ ID NO: 274 - protein, 34 aa, Artificial Sequence
  EGF domain monomer sequence
  MOD_RES (2)...(2): Xaa = Ala, Asp, Glu, Gly, Ile, Lys, Leu, Gln, Arg, Ser, Thr or Val
  MOD_RES (3)...(3): Xaa = Ala, Asp, Glu, Phe, Gly, His, Ile, Lys, Leu, Met, Asn, Pro, Gln, Arg, Ser, Thr or Val
  MOD_RES (4)...(4): Xaa = Ala, Glu, Phe, Gly, His, Leu, Asn, Pro, Gln, Arg, Ser, Thr, Trp or Tyr
  MOD_RES (5)...(5): Xaa = Ala, Asp, Glu, Phe, Gly, His, Ile, Lys, Leu, Asn, Pro, Arg, Ser or Thr
  MOD_RES (6)...(6): Xaa = Ala, Phe, Gly, Ile, Lys, Leu, Met, Asn, Pro, Gln, Arg, Ser, Thr, Val or Tyr
  MOD_RES (8)...(8): Xaa = Ala, Cys, Asp, Glu, Phe, Gly, His, Lys, Leu, Met, Asn, Pro, Gln, Arg, Ser, Val or Tyr
  MOD_RES (9)...(9): Xaa = Ala, Asp, Glu, Gly, His, Ile, Lys, Leu, Met, Asn, Pro, Gln, Arg, Ser, Thr, Val or Tyr
  MOD_RES (10)...(10): Xaa = Ala, Asp, Glu, Phe, Gly, His, Lys, Leu, Asn, Gln, Arg, Ser, Thr or Tyr
  MOD_RES (11)...(11): Xaa = Ala, Phe, Gly, His, Gln, Ser, Thr or Val
  MOD_RES (12)...(12): Xaa = Ala, Asp, Glu, Phe, His, Ile, Lys, Leu, Met, Asn, Gln, Arg, Ser, Thr or Val
  MOD_RES (14)...(14): Xaa = Ala, Asp, Glu, Phe, Gly, His, Ile, Lys, Leu, Met, Asn, Gln, Arg, Ser, Thr, Val, Trp or Tyr
  MOD_RES (15)...(15): Xaa = Ala, Asp, Glu, Lys, Leu, Asn, Pro, Gln, Arg, Ser, Thr or Val
  MOD_RES (16)...(16): Xaa = Ala, Cys, Asp, Glu, Phe, Gly, His, Ile, Lys, Leu, Met, Asn, Pro, Gln, Arg, Ser, Thr, Val or Tyr
  MOD_RES (17)...(17): Xaa = Ala, Asp, Glu, Phe, Gly, His, Ile, Lys, Leu, Met, Asn, Pro, Gln, Arg, Ser, Thr, Val, Trp or Tyr
  MOD_RES (18)...(18): Xaa = Ala, Asp, Glu, Phe, Gly, His, Ile, Lys, Leu, Asn, Pro, Gln, Arg, Ser, Thr, Val or Trp
  MOD_RES (19)...(19): Xaa = Ala, Asp, Glu, Gly, His, Lys, Leu, Met, Asn, Gln, Arg, Ser, Thr, Val, Trp or Tyr
  MOD_RES (20)...(20): Xaa = Ala, Phe, His, Ile, Leu, Pro, Arg, Thr, Val or Tyr
  MOD_RES (21)...(21): Xaa = Ala, Asp, Glu, Phe, His, Ile, Lys, Leu, Met, Asn, Gln, Arg, Ser, Thr, Val, Trp or Tyr
  MOD_RES (23)...(23): Xaa = Ala, Asp, Glu, Phe, Gly, His, Ile, Lys, Leu, Met, Asn, Pro, Gln, Arg, Ser, Thr, Val, Trp or Tyr
  MOD_RES (25)...(25): Xaa = Ala, Asp, Glu, Phe, Gly, His, Ile, Lys, Leu, Asn, Pro, Gln, Arg, Ser, Thr, Val or Tyr
  MOD_RES (26)...(26): Xaa = Ala, Asp, Glu, Phe, His, Ile, Lys, Leu, Met, Asn, Pro, Gln, Arg, Ser, Thr or Val
  MOD_RES (27)...(27): Xaa = Asp, Glu, Gly, Asn, Pro or Ser
  MOD_RES (28)...(28): Xaa = Ala, Asp, Glu, Phe, His, Leu, Met, Gln, Arg, Ser, Thr, Trp or Tyr
  MOD_RES (29)...(29): Xaa = Ala, Asp, Glu, Phe, Gly, His, Ile, Lys, Leu, Met, Asn, Gln, Arg, Ser, Thr, Val or Tyr
  MOD_RES (30)...(30): Xaa = Ala, Phe, Gly, Ile, Lys, Leu, Met, Pro, Gln, Arg, Ser, Thr, Val, Trp or Tyr
  MOD_RES (31)...(31): Xaa = Ala, Asp, Glu, Phe, Gly, His, Lys, Leu, Met, Asn, Pro, Gln, Arg, Ser, Thr, Val or Trp
  MOD_RES (32)...(32): Xaa = Ala, Asp, Glu, Gly, Ile, Lys, Leu, Met, Asn, Pro, Gln, Arg, Ser, Thr, Val or Tyr
  MOD_RES (33)...(33): Xaa = Ala, Asp, Glu, Phe, Gly, His, Ile, Lys, Leu, Met, Asn, Gln, Ser, Thr or Val
CXXXXXCXXXXXCXXXXXXXXCXCXXXXXXXXXC

SEQ ID NO: 275 - protein, 35 aa, Artificial Sequence
  EGF domain monomer sequence
  MOD_RES (2)...(2): Xaa = Ala, Asp, Glu, Gly, Ile, Lys, Leu, Gln, Arg, Ser, Thr or Val
  MOD_RES (3)...(3): Xaa = Ala, Asp, Glu, Phe, Gly, His, Ile, Lys, Leu, Met, Asn, Pro, Gln, Arg, Ser, Thr or Val
  MOD_RES (4)...(4): Xaa = Ala, Glu, Phe, Gly, His, Leu, Asn, Pro, Gln, Arg, Ser, Thr, Trp or Tyr
  MOD_RES (5)...(5): Xaa = Ala, Asp, Glu, Phe, Gly, His, Ile, Lys, Leu, Asn, Pro, Arg, Ser or Thr
  MOD_RES (6)...(6): Xaa = Ala, Phe, Gly, Ile, Lys, Leu, Met, Asn, Pro, Gln, Arg, Ser, Thr, Val or Tyr
  MOD_RES (8)...(8): Xaa = Ala, Cys, Asp, Glu, Phe, Gly, His, Lys, Leu, Met, Asn, Pro, Gln, Arg, Ser, Val or Tyr
  MOD_RES (9)...(9): Xaa = Ala, Asp, Glu, Gly, His, Ile, Lys, Leu, Met, Asn, Pro, Gln, Arg, Ser, Thr, Val or Tyr
  MOD_RES (10)...(10): Xaa = Ala, Asp, Glu, Phe, Gly, His, Lys, Leu, Asn, Gln, Arg, Ser, Thr or Tyr
  MOD_RES (11)...(11): Xaa = Ala, Phe, Gly, His, Gln, Ser, Thr or Val
  MOD_RES (12)...(12): Xaa = Ala, Asp, Glu, Phe, His, Ile, Lys, Leu, Met, Asn, Gln, Arg, Ser, Thr or Val
  MOD_RES (14)...(14): Xaa = Ala, Asp, Glu, Phe, Gly, His, Ile, Lys, Leu, Met, Asn, Gln, Arg, Ser, Thr, Val, Trp or Tyr
  MOD_RES (15)...(15): Xaa = Ala, Asp, Glu, Lys, Leu, Asn, Pro, Gln, Arg, Ser, Thr or Val
  MOD_RES (16)...(16): Xaa = Ala, Cys, Asp, Glu, Phe, Gly, His, Ile, Lys, Leu, Met, Asn, Pro, Gln, Arg, Ser, Thr, Val or Tyr
  MOD_RES (17)...(17): Xaa = Ala, Asp, Glu, Phe, Gly, His, Ile, Lys, Leu, Met, Asn, Pro, Gln, Arg, Ser, Thr, Val, Trp or Tyr
  MOD_RES (18)...(18): Xaa = Ala, Asp, Glu, Phe, Gly, His, Ile, Lys, Leu, Asn, Pro, Gln, Arg, Ser, Thr, Val or Trp
  MOD_RES (19)...(19): Xaa = Ala, Asp, Glu, Gly, His, Lys, Leu, Met, Asn, Gln, Arg, Ser, Thr, Val, Trp or Tyr
  MOD_RES (20)...(20): Xaa = Ala, Phe, His, Ile, Leu, Pro, Arg, Thr, Val or Tyr
  MOD_RES (21)...(21): Xaa = Ala, Asp, Glu, Phe, His, Ile, Lys, Leu, Met, Asn, Gln, Arg, Ser, Thr, Val, Trp or Tyr
  MOD_RES (23)...(23): Xaa = Ala, Asp, Glu, Phe, Gly, His, Ile, Lys, Leu, Met, Asn, Pro, Gln, Arg, Ser, Thr, Val, Trp or Tyr
  MOD_RES (25)...(25): Xaa = Ala, Asp, Glu, Phe, Gly, His, Ile, Lys, Leu, Asn, Pro, Gln, Arg, Ser, Thr, Val or Tyr
  MOD_RES (26)...(26): Xaa = Ala, Asp, Glu, Phe, His, Ile, Lys, Leu, Met, Asn, Pro, Gln, Arg, Ser, Thr or Val
  MOD_RES (27)...(27): Xaa = Asp, Glu, Gly, Asn, Pro or Ser
  MOD_RES (28)...(28): Xaa = Ala, Asp, Glu, Phe, His, Leu, Met, Gln, Arg, Ser, Thr, Trp or Tyr
  MOD_RES (29)...(29): Xaa = Ala, Asp, Glu, Phe, Gly, His, Ile, Lys, Leu, Met, Asn, Gln, Arg, Ser, Thr, Val or Tyr
  MOD_RES (30)...(30): Xaa = Ala, Phe, Gly, Ile, Lys, Leu, Met, Pro, Gln, Arg, Ser, Thr, Val, Trp or Tyr
  MOD_RES (31)...(31): Xaa = Ala, Asp, Glu, Phe, Gly, His, Lys, Leu, Met, Asn, Pro, Gln, Arg, Ser, Thr, Val or Trp
  MOD_RES (32)...(32): Xaa = Ala, Asp, Glu, Gly, Ile, Lys, Leu, Met, Asn, Pro, Gln, Arg, Ser, Thr, Val or Tyr
  MOD_RES (33)...(33): Xaa = Ala, Asp, Glu, Phe, Gly, His, Ile, Lys, Leu, Met, Asn, Gln, Ser, Thr or Val
  MOD_RES (34)...(34): Xaa = Glu, Phe, Gly, His, Ile, Lys, Leu, Met, Asn, Pro, Gln, Arg, Ser, Thr or Trp
CXXXXXCXXXXXCXXXXXXXXCXCXXXXXXXXXXC

SEQ ID NO: 276 - protein, 36 aa, Artificial Sequence
  EGF domain monomer sequence
  MOD_RES (2)...(2): Xaa = Ala, Asp, Glu, Gly, Ile, Lys, Leu, Gln, Arg, Ser, Thr or Val
  MOD_RES (3)...(3): Xaa = Ala, Asp, Glu, Phe, Gly, His, Ile, Lys, Leu, Met, Asn, Pro, Gln, Arg, Ser, Thr or Val
  MOD_RES (4)...(4): Xaa = Ala, Glu, Phe, Gly, His, Leu, Asn, Pro, Gln, Arg, Ser, Thr, Trp or Tyr
  MOD_RES (5)...(5): Xaa = Ala, Asp, Glu, Phe, Gly, His, Ile, Lys, Leu, Asn, Pro, Arg, Ser or Thr
  MOD_RES (6)...(6): Xaa = Ala, Phe, Gly, Ile, Lys, Leu, Met, Asn, Pro, Gln, Arg, Ser, Thr, Val or Tyr
  MOD_RES (8)...(8): Xaa = Ala, Cys, Asp, Glu, Phe, Gly, His, Lys, Leu, Met, Asn, Pro, Gln, Arg, Ser, Val or Tyr
  MOD_RES (9)...(9): Xaa = Ala, Asp, Glu, Gly, His, Ile, Lys, Leu, Met, Asn, Pro, Gln, Arg, Ser, Thr, Val or Tyr
  MOD_RES (10)...(10): Xaa = Ala, Asp, Glu, Phe, Gly, His, Lys, Leu, Asn, Gln, Arg, Ser, Thr or Tyr
  MOD_RES (11)...(11): Xaa = Ala, Phe, Gly, His, Gln, Ser, Thr or Val
  MOD_RES (12)...(12): Xaa = Ala, Asp, Glu, Phe, His, Ile, Lys, Leu, Met, Asn, Gln, Arg, Ser, Thr or Val
  MOD_RES (14)...(14): Xaa = Ala, Asp, Glu, Phe, Gly, His, Ile, Lys, Leu, Met, Asn, Gln, Arg, Ser, Thr, Val, Trp or Tyr
  MOD_RES (15)...(15): Xaa = Ala, Asp, Glu, Lys, Leu, Asn, Pro, Gln, Arg, Ser, Thr or Val
  MOD_RES (16)...(16): Xaa = Ala, Cys, Asp, Glu, Phe, Gly, His, Ile, Lys, Leu, Met, Asn, Pro, Gln, Arg, Ser, Thr, Val or Tyr
  MOD_RES (17)...(17): Xaa = Ala, Asp, Glu, Phe, Gly, His, Ile, Lys, Leu, Met, Asn, Pro, Gln, Arg, Ser, Thr, Val, Trp or Tyr
  MOD_RES (18)...(18): Xaa = Ala, Asp, Glu, Phe, Gly, His, Ile, Lys, Leu, Asn, Pro, Gln, Arg, Ser, Thr, Val or Trp
  MOD_RES (19)...(19): Xaa = Ala, Asp, Glu, Gly, His, Lys, Leu, Met, Asn, Gln, Arg, Ser, Thr, Val, Trp or Tyr
  MOD_RES (20)...(20): Xaa = Ala, Phe, His, Ile, Leu, Pro, Arg, Thr, Val or Tyr
  MOD_RES (21)...(21): Xaa = Ala, Asp, Glu, Phe, His, Ile, Lys, Leu, Met, Asn, Gln, Arg, Ser, Thr, Val, Trp or Tyr
  MOD_RES (23)...(23): Xaa = Ala, Asp, Glu, Phe, Gly, His, Ile, Lys, Leu, Met, Asn, Pro, Gln, Arg, Ser, Thr, Val, Trp or Tyr
  MOD_RES (25)...(25): Xaa = Ala, Asp, Glu, Phe, Gly, His, Ile, Lys, Leu, Asn, Pro, Gln, Arg, Ser, Thr, Val or Tyr
  MOD_RES (26)...(26): Xaa = Ala, Asp, Glu, Phe, His, Ile, Lys, Leu, Met, Asn, Pro, Gln, Arg, Ser, Thr or Val
  MOD_RES (27)...(27): Xaa = Asp, Glu, Gly, Asn, Pro or Ser
  MOD_RES (28)...(28): Xaa = Ala, Asp, Glu, Phe, His, Leu, Met, Gln, Arg, Ser, Thr, Trp or Tyr
  MOD_RES (29)...(29): Xaa = Ala, Asp, Glu, Phe, Gly, His, Ile, Lys, Leu, Met, Asn, Gln, Arg, Ser, Thr, Val or Tyr
  MOD_RES (30)...(30): Xaa = Ala, Phe, Gly, Ile, Lys, Leu, Met, Pro, Gln, Arg, Ser, Thr, Val, Trp or Tyr
  MOD_RES (31)...(31): Xaa = Ala, Asp, Glu, Phe, Gly, His, Lys, Leu, Met, Asn, Pro, Gln, Arg, Ser, Thr, Val or Trp
  MOD_RES (32)...(32): Xaa = Ala, Asp, Glu, Gly, Ile, Lys, Leu, Met, Asn, Pro, Gln, Arg, Ser, Thr, Val or Tyr
  MOD_RES (33)...(33): Xaa = Ala, Asp, Glu, Phe, Gly, His, Ile, Lys, Leu, Met, Asn, Gln, Ser, Thr or Val
  MOD_RES (34)...(34): Xaa = Glu, Phe, Gly, His, Ile, Lys, Leu, Met, Asn, Pro, Gln, Arg, Ser, Thr or Trp
  MOD_RES (35)...(35): Xaa = Ala, Asp, Glu, Phe, Gly, His, Lys, Leu, Met, Asn, Pro, Gln, Arg, Ser, Thr, Val or Tyr
CXXXXXCXXXXXCXXXXXXXXCXCXXXXXXXXXXXC

SEQ ID NO: 277 - protein, 37 aa, Artificial Sequence
  EGF domain monomer sequence
  MOD_RES (2)...(2): Xaa = Ala, Asp, Glu, Gly, Ile, Lys, Leu, Gln, Arg, Ser, Thr or Val
  MOD_RES (3)...(3): Xaa = Ala, Asp, Glu, Phe, Gly, His, Ile, Lys, Leu, Met, Asn, Pro, Gln, Arg, Ser, Thr or Val
  MOD_RES (4)...(4): Xaa = Ala, Glu, Phe, Gly, His, Leu, Asn, Pro, Gln, Arg, Ser, Thr, Trp or Tyr
  MOD_RES (5)...(5): Xaa = Ala, Asp, Glu, Phe, Gly, His, Ile, Lys, Leu, Asn, Pro, Arg, Ser or Thr
  MOD_RES (6)...(6): Xaa = Ala, Phe, Gly, Ile, Lys, Leu, Met, Asn, Pro, Gln, Arg, Ser, Thr, Val or Tyr
  MOD_RES (8)...(8): Xaa = Ala, Cys, Asp, Glu, Phe, Gly, His, Lys, Leu, Met, Asn, Pro, Gln, Arg, Ser, Val or Tyr
  MOD_RES (9)...(9): Xaa = Ala, Asp, Glu, Gly, His, Ile, Lys, Leu, Met, Asn, Pro, Gln, Arg, Ser, Thr, Val or Tyr
  MOD_RES (10)...(10): Xaa = Ala, Asp, Glu, Phe, Gly, His, Lys, Leu, Asn, Gln, Arg, Ser, Thr or Tyr
  MOD_RES (11)...(11): Xaa = Ala, Phe, Gly, His, Gln, Ser, Thr or Val
  MOD_RES (12)...(12): Xaa = Ala, Asp, Glu, Phe, His, Ile, Lys, Leu, Met, Asn, Gln, Arg, Ser, Thr or Val
  MOD_RES (14)...(14): Xaa = Ala, Asp, Glu, Phe, Gly, His, Ile, Lys, Leu, Met, Asn, Gln, Arg, Ser, Thr, Val, Trp or Tyr
  MOD_RES (15)...(15): Xaa = Ala, Asp, Glu, Lys, Leu, Asn, Pro, Gln, Arg, Ser, Thr or Val
  MOD_RES (16)...(16): Xaa = Ala, Cys, Asp, Glu, Phe, Gly, His, Ile, Lys, Leu, Met, Asn, Pro, Gln, Arg, Ser, Thr, Val or Tyr
  MOD_RES (17)...(17): Xaa = Ala, Asp, Glu, Phe, Gly, His, Ile, Lys, Leu, Met, Asn, Pro, Gln, Arg, Ser, Thr, Val, Trp or Tyr
  MOD_RES (18)...(18): Xaa = Ala, Asp, Glu, Phe, Gly, His, Ile, Lys, Leu, Asn, Pro, Gln, Arg, Ser, Thr, Val or Trp
  MOD_RES (19)...(19): Xaa = Ala, Asp, Glu, Gly, His, Lys, Leu, Met, Asn, Gln, Arg, Ser, Thr, Val, Trp or Tyr
  MOD_RES (20)...(20): Xaa = Ala, Phe, His, Ile, Leu, Pro, Arg, Thr, Val or Tyr
  MOD_RES (21)...(21): Xaa = Ala, Asp, Glu, Phe, His, Ile, Lys, Leu, Met, Asn, Gln, Arg, Ser, Thr, Val, Trp or Tyr
  MOD_RES (23)...(23): Xaa = Ala, Asp, Glu, Phe, Gly, His, Ile, Lys, Leu, Met, Asn, Pro, Gln, Arg, Ser, Thr, Val, Trp or Tyr
  MOD_RES (25)...(25): Xaa = Ala, Asp, Glu, Phe, Gly, His, Ile, Lys, Leu, Asn, Pro, Gln, Arg, Ser, Thr, Val or Tyr
  MOD_RES (26)...(26): Xaa = Ala, Asp, Glu, Phe, His, Ile, Lys, Leu, Met, Asn, Pro, Gln, Arg, Ser, Thr or Val
  MOD_RES (27)...(27): Xaa = Asp, Glu, Gly, Asn, Pro or Ser
  MOD_RES (28)...(28): Xaa = Ala, Asp, Glu, Phe, His, Leu, Met, Gln, Arg, Ser, Thr, Trp or Tyr
  MOD_RES (29)...(29): Xaa = Ala, Asp, Glu, Phe, Gly, His, Ile, Lys, Leu, Met, Asn, Gln, Arg, Ser, Thr, Val or Tyr
  MOD_RES (30)...(30): Xaa = Ala, Phe, Gly, Ile, Lys, Leu, Met, Pro, Gln, Arg, Ser, Thr, Val, Trp or Tyr
  MOD_RES (31)...(31): Xaa = Ala, Asp, Glu, Phe, Gly, His, Lys, Leu, Met, Asn, Pro, Gln, Arg, Ser, Thr, Val or Trp
  MOD_RES (32)...(32): Xaa = Ala, Asp, Glu, Gly, Ile, Lys, Leu, Met, Asn, Pro, Gln, Arg, Ser, Thr, Val or Tyr
  MOD_RES (33)...(33): Xaa = Ala, Asp, Glu, Phe, Gly, His, Ile, Lys, Leu, Met, Asn, Gln, Ser, Thr or Val
  MOD_RES (34)...(34): Xaa = Glu, Phe, Gly, His, Ile, Lys, Leu, Met, Asn, Pro, Gln, Arg, Ser, Thr or Trp
  MOD_RES (35)...(35): Xaa = Ala, Asp, Glu, Phe, Gly, His, Lys, Leu, Met, Asn, Pro, Gln, Arg, Ser, Thr, Val or Tyr
  MOD_RES (36)...(36): Xaa = Ala, Asp, Glu, Phe, Gly, His, Ile, Lys, Met, Asn, Gln, Arg, Ser, Thr, Val or Tyr
CXXXXXCXXXXXCXXXXXXXXCXCXXXXXXXXXXXXC

SEQ ID NO: 278 - protein, 34 aa, Artificial Sequence
  EGF domain monomer sequence
  MOD_RES (2)...(2): Xaa = Ala, Asp, Glu, Phe, Gly, Ile, Lys, Leu, Met, Asn, Pro, Gln, Arg, Ser, Thr, Val or Tyr
  MOD_RES (3)...(3): Xaa = Ala, Asp, Glu, Phe, Gly, His, Ile, Lys, Leu, Met, Asn, Pro, Gln, Arg, Ser, Thr, Val or Tyr
  MOD_RES (4)...(4): Xaa = Ala, Asp, Glu, Phe, Gly, His, Ile, Lys, Leu, Met, Asn, Pro, Gln, Arg, Ser, Thr, Val or Trp
  MOD_RES (5)...(5): Xaa = Ala, Asp, Glu, Phe, Gly, His, Ile, Lys, Leu, Met, Asn, Pro, Gln, Arg, Ser, Thr or Val
  MOD_RES (6)...(6): Xaa = Ala, Asp, Glu, Phe, Gly, His, Ile, Lys, Leu, Asn, Pro, Gln, Arg, Ser, Val or Tyr
  MOD_RES (7)...(7): Xaa = Ala, Asp, Glu, Gly, Ile, Lys, Leu, Met, Asn, Pro, Gln, Arg, Ser, Thr, Val or Tyr
  MOD_RES (9)...(9): Xaa = Ala, Cys, Asp, Glu, Phe, Gly, His, Lys, Leu, Met, Asn, Pro, Gln, Arg, Ser, Val or Tyr
  MOD_RES (10)...(10): Xaa = Ala, Asp, Glu, Gly, His, Ile, Lys, Leu, Met, Asn, Pro, Gln, Arg, Ser, Thr, Val or Tyr
  MOD_RES (11)...(11): Xaa = Ala, Asp, Glu, Phe, Gly, His, Lys, Leu, Asn, Gln, Arg, Ser, Thr or Tyr
  MOD_RES (12)...(12): Xaa = Ala, Phe, Gly, His, Gln, Ser, Thr or Val
  MOD_RES (13)...(13): Xaa = Ala, Asp, Glu, Phe, His, Ile, Lys, Leu, Met, Asn, Gln, Arg, Ser, Thr or Val
  MOD_RES (15)...(15): Xaa = Ala, Asp, Glu, Phe, Gly, His, Ile, Lys, Leu, Met, Asn, Gln, Arg, Ser, Thr, Val, Trp or Tyr
  MOD_RES (16)...(16): Xaa = Ala, Asp, Glu, Lys, Leu, Asn, Pro, Gln, Arg, Ser, Thr or Val
  MOD_RES (17)...(17): Xaa = Ala, Cys, Asp, Glu, Phe, Gly, His, Ile, Lys, Leu, Met, Asn, Pro, Gln, Arg, Ser, Thr, Val or Tyr
  MOD_RES (18)...(18): Xaa = Ala, Asp, Glu, Phe, Gly, His, Ile, Lys, Leu, Met, Asn, Pro, Gln, Arg, Ser, Thr, Val, Trp or Tyr
  MOD_RES (19)...(19): Xaa = Ala, Asp, Glu, Phe, Gly, His, Ile, Lys, Leu, Asn, Pro, Gln, Arg, Ser, Thr, Val or Trp
  MOD_RES (20)...(20): Xaa = Ala, Asp, Glu, Gly, His, Lys, Leu, Met, Asn, Gln, Arg, Ser, Thr, Val, Trp or Tyr
  MOD_RES (21)...(21): Xaa = Ala, Phe, His, Ile, Leu, Pro, Arg, Thr, Val or Tyr
  MOD_RES (22)...(22): Xaa = Ala, Asp, Glu, Phe, His, Ile, Lys, Leu, Met, Asn, Gln, Arg, Ser, Thr, Val, Trp or Tyr
  MOD_RES (24)...(24): Xaa = Ala, Asp, Glu, Phe, Gly, His, Ile, Lys, Leu, Met, Asn, Pro, Gln, Arg, Ser, Thr, Val, Trp or Tyr
  MOD_RES (26)...(26): Xaa = Ala, Asp, Glu, Phe, His, Lys, Leu, Met, Asn, Pro, Gln, Arg, Ser, Thr, Val, Trp or Tyr
  MOD_RES (27)...(27): Xaa = Ala, Asp, Glu, Phe, Gly, His, Lys, Leu, Asn, Pro, Gln, Arg, Ser, Thr, Val or Tyr
  MOD_RES (28)...(28): Xaa = Ala, Glu, Gly, His, Lys, Leu, Asn, Pro, Arg, Ser, Thr or Tyr
  MOD_RES (29)...(29): Xaa = Phe, His, Ile, Leu, Met, Arg, Thr, Trp or Tyr
  MOD_RES (30)...(30): Xaa = Ala, Asp, Glu, Phe, Gly, His, Ile, Lys, Leu, Met, Asn, Gln, Arg, Ser, Thr, Val or Tyr
  MOD_RES (31)...(31): Xaa = Asp, Gly or Ser
  MOD_RES (32)...(32): Xaa = Ala, Asp, Glu, Phe, His, Ile, Lys, Leu, Asn, Pro, Gln, Arg, Ser, Thr, Val or Tyr
  MOD_RES (33)...(33): Xaa = Ala, Asp, Glu, Phe, His, Ile, Lys, Leu, Met, Asn, Gln, Arg, Ser, Thr or Tyr
CXXXXXXCXXXXXCXXXXXXXXCXCXXXXXXXXC

SEQ ID NO: 279 - protein, 35 aa, Artificial Sequence
  EGF domain monomer sequence
  MOD_RES (2)...(2): Xaa = Ala, Asp, Glu, Phe, Gly, Ile, Lys, Leu, Met, Asn, Pro, Gln, Arg, Ser, Thr, Val or Tyr
  MOD_RES (3)...(3): Xaa = Ala, Asp, Glu, Phe, Gly, His, Ile, Lys, Leu, Met, Asn, Pro, Gln, Arg, Ser, Thr, Val or Tyr
  MOD_RES (4)...(4): Xaa = Ala, Asp, Glu, Phe, Gly, His, Ile, Lys, Leu, Met, Asn, Pro, Gln, Arg, Ser, Thr, Val or Trp
  MOD_RES (5)...(5): Xaa = Ala, Asp, Glu, Phe, Gly, His, Ile, Lys, Leu, Met, Asn, Pro, Gln, Arg, Ser, Thr or Val
  MOD_RES (6)...(6): Xaa = Ala, Asp, Glu, Phe, Gly, His, Ile, Lys, Leu, Asn, Pro, Gln, Arg, Ser, Val or Tyr
  MOD_RES (7)...(7): Xaa = Ala, Asp, Glu, Gly, Ile, Lys, Leu, Met, Asn, Pro, Gln, Arg, Ser, Thr, Val or Tyr
  MOD_RES (9)...(9): Xaa = Ala, Cys, Asp, Glu, Phe, Gly, His, Lys, Leu, Met, Asn, Pro, Gln, Arg, Ser, Val or Tyr
  MOD_RES (10)...(10): Xaa = Ala, Asp, Glu, Gly, His, Ile, Lys, Leu, Met, Asn, Pro, Gln, Arg, Ser, Thr, Val or Tyr
  MOD_RES (11)...(11): Xaa = Ala, Asp, Glu, Phe, Gly, His, Lys, Leu, Asn, Gln, Arg, Ser, Thr or Tyr
  MOD_RES (12)...(12): Xaa = Ala, Phe, Gly, His, Gln, Ser, Thr or Val
  MOD_RES (13)...(13): Xaa = Ala, Asp, Glu, Phe, His, Ile, Lys, Leu, Met, Asn, Gln, Arg, Ser, Thr or Val
  MOD_RES (15)...(15): Xaa = Ala, Asp, Glu, Phe, Gly, His, Ile, Lys, Leu, Met, Asn, Gln, Arg, Ser, Thr, Val, Trp or Tyr
  MOD_RES (16)...(16): Xaa = Ala, Asp, Glu, Lys, Leu, Asn, Pro, Gln, Arg, Ser, Thr or Val
  MOD_RES (17)...(17): Xaa = Ala, Cys, Asp, Glu, Phe, Gly, His, Ile, Lys, Leu, Met, Asn, Pro, Gln, Arg, Ser, Thr, Val or Tyr
  MOD_RES (18)...(18): Xaa = Ala, Asp, Glu, Phe, Gly, His, Ile, Lys, Leu, Met, Asn, Pro, Gln, Arg, Ser, Thr, Val, Trp or Tyr
  MOD_RES (19)...(19): Xaa = Ala, Asp, Glu, Phe, Gly, His, Ile, Lys, Leu, Asn, Pro, Gln, Arg, Ser, Thr, Val or Trp
  MOD_RES (20)...(20): Xaa = Ala, Asp, Glu, Gly, His, Lys, Leu, Met, Asn, Gln, Arg, Ser, Thr, Val, Trp or Tyr
  MOD_RES (21)...(21): Xaa = Ala, Phe, His, Ile, Leu, Pro, Arg, Thr, Val or Tyr
  MOD_RES (22)...(22): Xaa = Ala, Asp, Glu, Phe, His, Ile, Lys, Leu, Met, Asn, Gln, Arg, Ser, Thr, Val, Trp or Tyr
  MOD_RES (24)...(24): Xaa = Ala, Asp, Glu, Phe, Gly, His, Ile, Lys, Leu, Met, Asn, Pro, Gln, Arg, Ser, Thr, Val, Trp or Tyr
  MOD_RES (26)...(26): Xaa = Ala, Asp, Glu, Phe, Gly, His, Ile, Lys, Leu, Asn, Pro, Gln, Arg, Ser, Thr, Val or Tyr
  MOD_RES (27)...(27): Xaa = Ala, Asp, Glu, Phe, His, Ile, Lys, Leu, Met, Asn, Pro, Gln, Arg, Ser, Thr or Val
  MOD_RES (28)...(28): Xaa = Asp, Glu, Gly, Asn, Pro or Ser
  MOD_RES (29)...(29): Xaa = Ala, Asp, Glu, Phe, His, Leu, Met, Gln, Arg, Ser, Thr, Trp or Tyr
  MOD_RES (30)...(30): Xaa = Ala, Asp, Glu, Phe, Gly, His, Ile, Lys, Leu, Met, Asn, Gln, Arg, Ser, Thr, Val or Tyr
  MOD_RES (31)...(31): Xaa = Ala, Phe, Gly, Ile, Lys, Leu, Met, Pro, Gln, Arg, Ser, Thr, Val, Trp or Tyr
  MOD_RES (32)...(32): Xaa = Ala, Asp, Glu, Phe, Gly, His, Lys, Leu, Met, Asn, Pro, Gln, Arg, Ser, Thr, Val or Trp
  MOD_RES (33)...(33): Xaa = Ala, Asp, Glu, Gly, Ile, Lys, Leu, Met, Asn, Pro, Gln, Arg, Ser, Thr, Val or Tyr
  MOD_RES (34)...(34): Xaa = Ala, Asp, Glu, Phe, Gly, His, Ile, Lys, Leu, Met, Asn, Gln, Ser, Thr or Val
CXXXXXXCXXXXXCXXXXXXXXCXCXXXXXXXXXC

SEQ ID NO: 280 - protein, 36 aa, Artificial Sequence
  EGF domain monomer sequence
  MOD_RES (2)...(2): Xaa = Ala, Asp, Glu, Phe, Gly, Ile, Lys, Leu, Met, Asn, Pro, Gln, Arg, Ser, Thr, Val or Tyr
  MOD_RES (3)...(3): Xaa = Ala, Asp, Glu, Phe, Gly, His, Ile, Lys, Leu, Met, Asn, Pro, Gln, Arg, Ser, Thr, Val or Tyr
  MOD_RES (4)...(4): Xaa = Ala, Asp, Glu, Phe, Gly, His, Ile, Lys, Leu, Met, Asn, Pro, Gln, Arg, Ser, Thr, Val or Trp
  MOD_RES (5)...(5): Xaa = Ala, Asp, Glu, Phe, Gly, His, Ile, Lys, Leu, Met, Asn, Pro, Gln, Arg, Ser, Thr or Val
  MOD_RES (6)...(6): Xaa = Ala, Asp, Glu, Phe, Gly, His, Ile, Lys, Leu, Asn, Pro, Gln, Arg, Ser, Val or Tyr
  MOD_RES (7)...(7): Xaa = Ala, Asp, Glu, Gly, Ile, Lys, Leu, Met, Asn, Pro, Gln, Arg, Ser, Thr, Val or Tyr
  MOD_RES (9)...(9): Xaa = Ala, Cys, Asp, Glu, Phe, Gly, His, Lys, Leu, Met, Asn, Pro, Gln, Arg, Ser, Val or Tyr
  MOD_RES (10)...(10): Xaa = Ala, Asp, Glu, Gly, His, Ile, Lys, Leu, Met, Asn, Pro, Gln, Arg, Ser, Thr, Val or Tyr
  MOD_RES (11)...(11): Xaa = Ala, Asp, Glu, Phe, Gly, His, Lys, Leu, Asn, Gln, Arg, Ser, Thr or Tyr
  MOD_RES (12)...(12): Xaa = Ala, Phe, Gly, His, Gln, Ser, Thr or Val
  MOD_RES (13)...(13): Xaa = Ala, Asp, Glu, Phe, His, Ile, Lys, Leu, Met, Asn, Gln, Arg, Ser, Thr or Val
  MOD_RES (15)...(15): Xaa = Ala, Asp, Glu, Phe, Gly, His, Ile, Lys, Leu, Met, Asn, Gln, Arg, Ser, Thr, Val, Trp or Tyr
  MOD_RES (16)...(16): Xaa = Ala, Asp, Glu, Lys, Leu, Asn, Pro, Gln, Arg, Ser, Thr or Val
  MOD_RES (17)...(17): Xaa = Ala, Cys, Asp, Glu, Phe, Gly, His, Ile, Lys, Leu, Met, Asn, Pro, Gln, Arg, Ser, Thr, Val or Tyr
  MOD_RES (18)...(18): Xaa = Ala, Asp, Glu, Phe, Gly, His, Ile, Lys, Leu, Met, Asn, Pro, Gln, Arg, Ser, Thr, Val, Trp or Tyr
  MOD_RES (19)...(19): Xaa = Ala, Asp, Glu, Phe, Gly, His, Ile, Lys, Leu, Asn, Pro, Gln, Arg, Ser, Thr, Val or Trp
  MOD_RES (20)...(20): Xaa = Ala, Asp, Glu, Gly, His, Lys, Leu, Met, Asn, Gln, Arg, Ser, Thr, Val, Trp or Tyr
  MOD_RES (21)...(21): Xaa = Ala, Phe, His, Ile, Leu, Pro, Arg, Thr, Val or Tyr
  MOD_RES (22)...(22): Xaa = Ala, Asp, Glu, Phe, His, Ile, Lys, Leu, Met, Asn, Gln, Arg, Ser, Thr, Val, Trp or Tyr
  MOD_RES (24)...(24): Xaa = Ala, Asp, Glu, Phe, Gly, His, Ile, Lys, Leu, Met, Asn, Pro, Gln, Arg, Ser, Thr, Val, Trp or Tyr
  MOD_RES (26)...(26): Xaa = Ala, Asp, Glu, Phe, Gly, His, Ile, Lys, Leu, Asn, Pro, Gln, Arg, Ser, Thr, Val or Tyr
  MOD_RES (27)...(27): Xaa = Ala, Asp, Glu, Phe, His, Ile, Lys, Leu, Met, Asn, Pro, Gln, Arg, Ser, Thr or Val
  MOD_RES (28)...(28): Xaa = Asp, Glu, Gly, Asn, Pro or Ser
  MOD_RES (29)...(29): Xaa = Ala, Asp, Glu, Phe, His, Leu, Met, Gln, Arg, Ser, Thr, Trp or Tyr
  MOD_RES (30)...(30): Xaa = Ala, Asp, Glu, Phe, Gly, His, Ile, Lys, Leu, Met, Asn, Gln, Arg, Ser, Thr, Val or Tyr
  MOD_RES (31)...(31): Xaa = Ala, Phe, Gly, Ile, Lys, Leu, Met, Pro, Gln, Arg, Ser, Thr, Val, Trp or Tyr
  MOD_RES (32)...(32): Xaa = Ala, Asp, Glu, Phe, Gly, His, Lys, Leu, Met, Asn, Pro, Gln, Arg, Ser, Thr, Val or Trp
  MOD_RES (33)...(33): Xaa = Ala, Asp, Glu, Gly, Ile, Lys, Leu, Met, Asn, Pro, Gln, Arg, Ser, Thr, Val or Tyr
  MOD_RES (34)...(34): Xaa = Ala, Asp, Glu, Phe, Gly, His, Ile, Lys, Leu, Met, Asn, Gln, Ser, Thr or Val
  MOD_RES (35)...(35): Xaa = Glu, Phe, Gly, His, Ile, Lys, Leu, Met, Asn, Pro, Gln, Arg, Ser, Thr or Trp
CXXXXXXCXXXXXCXXXXXXXXCXCXXXXXXXXXXC

SEQ ID NO: 281 - protein, 37 aa, Artificial Sequence
  EGF domain monomer sequence
  MOD_RES (2)...(2): Xaa = Ala, Asp, Glu, Phe, Gly, Ile, Lys, Leu, Met, Asn, Pro, Gln, Arg, Ser, Thr, Val or Tyr
  MOD_RES (3)...(3): Xaa = Ala, Asp, Glu, Phe, Gly, His, Ile, Lys, Leu, Met, Asn, Pro, Gln, Arg, Ser, Thr, Val or Tyr
  MOD_RES (4)...(4): Xaa = Ala, Asp, Glu, Phe, Gly, His, Ile, Lys, Leu, Met, Asn, Pro, Gln, Arg, Ser, Thr, Val or Trp
  MOD_RES (5)...(5): Xaa = Ala, Asp, Glu, Phe, Gly, His, Ile, Lys, Leu, Met, Asn, Pro, Gln, Arg, Ser, Thr or Val
  MOD_RES (6)...(6): Xaa = Ala, Asp, Glu, Phe, Gly, His, Ile, Lys, Leu, Asn, Pro, Gln, Arg, Ser, Val or Tyr
  MOD_RES (7)...(7): Xaa = Ala, Asp, Glu, Gly, Ile, Lys, Leu, Met, Asn, Pro, Gln, Arg, Ser, Thr, Val or Tyr
  MOD_RES (9)...(9): Xaa = Ala, Cys, Asp, Glu, Phe, Gly, His, Lys, Leu, Met, Asn, Pro, Gln, Arg, Ser, Val or Tyr
  MOD_RES (10)...(10): Xaa = Ala, Asp, Glu, Gly, His, Ile, Lys, Leu, Met, Asn, Pro, Gln, Arg, Ser, Thr, Val or Tyr
  MOD_RES (11)...(11): Xaa = Ala, Asp, Glu, Phe, Gly, His, Lys, Leu, Asn, Gln, Arg, Ser, Thr or Tyr
  MOD_RES (12)...(12): Xaa = Ala, Phe, Gly, His, Gln, Ser, Thr or Val
  MOD_RES (13)...(13): Xaa = Ala, Asp, Glu, Phe, His, Ile, Lys, Leu, Met, Asn, Gln, Arg, Ser, Thr or Val
  MOD_RES (15)...(15): Xaa = Ala, Asp, Glu, Phe, Gly, His, Ile, Lys, Leu, Met, Asn, Gln, Arg, Ser, Thr, Val, Trp or Tyr
  MOD_RES (16)...(16): Xaa = Ala, Asp, Glu, Lys, Leu, Asn, Pro, Gln, Arg, Ser, Thr or Val
  MOD_RES (17)...(17): Xaa = Ala, Cys, Asp, Glu, Phe, Gly, His, Ile, Lys, Leu, Met, Asn, Pro, Gln, Arg, Ser, Thr, Val or Tyr
  MOD_RES (18)...(18): Xaa = Ala, Asp, Glu, Phe, Gly, His, Ile, Lys, Leu, Met, Asn, Pro, Gln, Arg, Ser, Thr, Val, Trp or Tyr
  MOD_RES (19)...(19): Xaa = Ala, Asp, Glu, Phe, Gly, His, Ile, Lys, Leu, Asn, Pro, Gln, Arg, Ser, Thr, Val or Trp
  MOD_RES (20)...(20): Xaa = Ala, Asp, Glu, Gly, His, Lys, Leu, Met, Asn, Gln, Arg, Ser, Thr, Val, Trp or Tyr
  MOD_RES (21)...(21): Xaa = Ala, Phe, His, Ile, Leu, Pro, Arg, Thr, Val or Tyr
  MOD_RES (22)...(22): Xaa = Ala, Asp, Glu, Phe, His, Ile, Lys, Leu, Met, Asn, Gln, Arg, Ser, Thr, Val, Trp or Tyr
  MOD_RES (24)...(24): Xaa = Ala, Asp, Glu, Phe, Gly, His, Ile, Lys, Leu, Met, Asn, Pro, Gln, Arg, Ser, Thr, Val, Trp or Tyr
  MOD_RES (26)...(26): Xaa = Ala, Asp, Glu, Phe, Gly, His, Ile, Lys, Leu, Asn, Pro, Gln, Arg, Ser, Thr, Val or Tyr
  MOD_RES (27)...(27): Xaa = Ala, Asp, Glu, Phe, His, Ile, Lys, Leu, Met, Asn, Pro, Gln, Arg, Ser, Thr or Val
  MOD_RES (28)...(28): Xaa = Asp, Glu, Gly, Asn, Pro or Ser
  MOD_RES (29)...(29): Xaa = Ala, Asp, Glu, Phe, His, Leu, Met, Gln, Arg, Ser, Thr, Trp or Tyr
  MOD_RES (30)...(30): Xaa = Ala, Asp, Glu, Phe, Gly, His, Ile, Lys, Leu, Met, Asn, Gln, Arg, Ser, Thr, Val or Tyr
  MOD_RES (31)...(31): Xaa = Ala, Phe, Gly, Ile, Lys, Leu, Met, Pro, Gln, Arg, Ser, Thr, Val, Trp or Tyr
  MOD_RES (32)...(32): Xaa = Ala, Asp, Glu, Phe, Gly, His, Lys, Leu, Met, Asn, Pro, Gln, Arg, Ser, Thr, Val or Trp
  MOD_RES (33)...(33): Xaa = Ala, Asp, Glu, Gly, Ile, Lys, Leu, Met, Asn, Pro, Gln, Arg, Ser, Thr, Val or Tyr
  MOD_RES (34)...(34): Xaa = Ala, Asp, Glu, Phe, Gly, His, Ile, Lys, Leu, Met, Asn, Gln, Ser, Thr or Val
  MOD_RES (35)...(35): Xaa = Glu, Phe, Gly, His, Ile, Lys, Leu, Met, Asn, Pro, Gln, Arg, Ser, Thr or Trp
  MOD_RES (36)...(36): Xaa = Ala, Asp, Glu, Phe, Gly, His, Lys, Leu, Met, Asn, Pro, Gln, Arg, Ser, Thr, Val or Tyr
CXXXXXXCXXXXXCXXXXXXXXCXCXXXXXXXXXXXC

SEQ ID NO: 282 - protein, 38 aa, Artificial Sequence
  EGF domain monomer sequence
  MOD_RES (2)...(2): Xaa = Ala, Asp, Glu, Phe, Gly, Ile, Lys, Leu, Met, Asn, Pro, Gln, Arg, Ser, Thr, Val or Tyr
  MOD_RES (3)...(3): Xaa = Ala, Asp, Glu, Phe, Gly, His, Ile, Lys, Leu, Met, Asn, Pro, Gln, Arg, Ser, Thr, Val or Tyr
  MOD_RES (4)...(4): Xaa = Ala, Asp, Glu, Phe, Gly, His, Ile, Lys, Leu, Met, Asn, Pro, Gln, Arg, Ser, Thr, Val or Trp
  MOD_RES (5)...(5): Xaa = Ala, Asp, Glu, Phe, Gly, His, Ile, Lys, Leu, Met, Asn, Pro, Gln, Arg, Ser, Thr or Val
  MOD_RES (6)...(6): Xaa = Ala, Asp, Glu, Phe, Gly, His, Ile, Lys, Leu, Asn, Pro, Gln, Arg, Ser, Val or Tyr
  MOD_RES (7)...(7): Xaa = Ala, Asp, Glu, Gly, Ile, Lys, Leu, Met, Asn, Pro, Gln, Arg, Ser, Thr, Val or Tyr
  MOD_RES (9)...(9): Xaa = Ala, Cys, Asp, Glu, Phe, Gly, His, Lys, Leu, Met, Asn, Pro, Gln, Arg, Ser, Val or Tyr
  MOD_RES (10)...(10): Xaa = Ala, Asp, Glu, Gly, His, Ile, Lys, Leu, Met, Asn, Pro, Gln, Arg, Ser, Thr, Val or Tyr
  MOD_RES (11)...(11): Xaa = Ala, Asp, Glu, Phe, Gly, His, Lys, Leu, Asn, Gln, Arg, Ser, Thr or Tyr
  MOD_RES (12)...(12): Xaa = Ala, Phe, Gly, His, Gln, Ser, Thr or Val
  MOD_RES (13)...(13): Xaa = Ala, Asp, Glu, Phe, His, Ile, Lys, Leu, Met, Asn, Gln, Arg, Ser, Thr or Val
  MOD_RES (15)...(15): Xaa = Ala, Asp, Glu, Phe, Gly, His, Ile, Lys, Leu, Met, Asn, Gln, Arg, Ser, Thr, Val, Trp or Tyr
  MOD_RES (16)...(16): Xaa = Ala, Asp, Glu, Lys, Leu, Asn, Pro, Gln, Arg, Ser, Thr or Val
  MOD_RES (17)...(17): Xaa = Ala, Cys, Asp, Glu, Phe, Gly, His, Ile, Lys, Leu, Met, Asn, Pro, Gln, Arg, Ser, Thr, Val or Tyr
  MOD_RES (18)...(18): Xaa = Ala, Asp, Glu, Phe, Gly, His, Ile, Lys, Leu, Met, Asn, Pro, Gln, Arg, Ser, Thr, Val, Trp or Tyr
  MOD_RES (19)...(19): Xaa = Ala, Asp, Glu, Phe, Gly, His, Ile, Lys, Leu, Asn, Pro, Gln, Arg, Ser, Thr, Val or Trp
  MOD_RES (20)...(20): Xaa = Ala, Asp, Glu, Gly, His, Lys, Leu, Met, Asn, Gln, Arg, Ser, Thr, Val, Trp or Tyr
  MOD_RES (21)...(21): Xaa = Ala, Phe, His, Ile, Leu, Pro, Arg, Thr, Val or Tyr
  MOD_RES (22)...(22): Xaa = Ala, Asp, Glu, Phe, His, Ile, Lys, Leu, Met, Asn, Gln, Arg, Ser, Thr, Val, Trp or Tyr
  MOD_RES (24)...(24): Xaa = Ala, Asp, Glu, Phe, Gly, His, Ile, Lys, Leu, Met, Asn, Pro, Gln, Arg, Ser, Thr, Val, Trp or Tyr
  MOD_RES (26)...(26): Xaa = Ala, Asp, Glu, Phe, Gly, His, Ile, Lys, Leu, Asn, Pro, Gln, Arg, Ser, Thr, Val or Tyr
  MOD_RES (27)...(27): Xaa = Ala, Asp, Glu, Phe, His, Ile, Lys, Leu, Met, Asn, Pro, Gln, Arg, Ser, Thr or Val
  MOD_RES (28)...(28): Xaa = Asp, Glu, Gly, Asn, Pro or Ser
  MOD_RES (29)...(29): Xaa = Ala, Asp, Glu, Phe, His, Leu, Met, Gln, Arg, Ser, Thr, Trp or Tyr
  MOD_RES (30)...(30): Xaa = Ala, Asp, Glu, Phe, Gly, His, Ile, Lys, Leu, Met, Asn, Gln, Arg, Ser, Thr, Val or Tyr
  MOD_RES (31)...(31): Xaa = Ala, Phe, Gly, Ile, Lys, Leu, Met, Pro, Gln, Arg, Ser, Thr, Val, Trp or Tyr
  MOD_RES (32)...(32): Xaa = Ala, Asp, Glu, Phe, Gly, His, Lys, Leu, Met, Asn, Pro, Gln, Arg, Ser, Thr, Val or Trp
  MOD_RES (33)...(33): Xaa = Ala, Asp, Glu, Gly, Ile, Lys, Leu, Met, Asn, Pro, Gln, Arg, Ser, Thr, Val or Tyr
  MOD_RES (34)...(34): Xaa = Ala, Asp, Glu, Phe, Gly, His, Ile, Lys, Leu, Met, Asn, Gln, Ser, Thr or Val
  MOD_RES (35)...(35): Xaa = Glu, Phe, Gly, His, Ile, Lys, Leu, Met, Asn, Pro, Gln, Arg, Ser, Thr or Trp
  MOD_RES (36)...(36): Xaa = Ala, Asp, Glu, Phe, Gly, His, Lys, Leu, Met, Asn, Pro, Gln, Arg, Ser, Thr, Val or Tyr
  MOD_RES (37)...(37): Xaa = Ala, Asp, Glu, Phe, Gly, His, Ile, Lys, Met, Asn, Gln, Arg, Ser, Thr, Val or Tyr
CXXXXXXCXXXXXCXXXXXXXXCXCXXXXXXXXXXXXC

SEQ ID NO: 283 - protein, 32 aa, Artificial Sequence
  EGF domain monomer sequence
  MOD_RES (2)...(2): Xaa = Ala, Asp, Glu, Gly, Ile, Lys, Leu, Gln, Arg, Ser, Thr or Val
  MOD_RES (3)...(3): Xaa = Ala, Asp, Glu, Phe, Gly, His, Ile, Lys, Leu, Met, Asn, Pro, Gln, Arg, Ser, Thr or Val
  MOD_RES (4)...(4): Xaa = Ala, Glu, Phe, Gly, His, Leu, Asn, Pro, Gln, Arg, Ser, Thr, Trp or Tyr
  MOD_RES (5)...(5): Xaa = Ala, Asp, Glu, Phe, Gly, His, Ile, Lys, Leu, Asn, Pro, Arg, Ser or Thr
  MOD_RES (6)...(6): Xaa = Ala, Phe, Gly, Ile, Lys, Leu, Met, Asn, Pro, Gln, Arg, Ser, Thr, Val or Tyr
  MOD_RES (8)...(8): Xaa = Ala, Asp, Glu, Gly, His, Lys, Asn, Pro, Gln, Ser, Thr or Val
  MOD_RES (9)...(9): Xaa = Phe, Gly, His, Leu, Asn, Gln, Ser, Thr or Tyr
  MOD_RES (10)...(10): Xaa = Ala, Asp, Glu, Phe, Gly, His, Ile, Lys, Leu, Asn, Gln, Arg, Ser, Thr, Val or Tyr
  MOD_RES (12)...(12): Xaa = Ala, Asp, Phe, His, Ile, Lys, Leu, Met, Asn, Gln, Arg, Ser, Thr, Val or Tyr
  MOD_RES (13)...(13): Xaa = Ala, Asp, Glu, Phe, His, Leu, Met, Asn, Pro, Gln, Arg, Ser, Val or Tyr
  MOD_RES (14)...(14): Xaa = Ala, Asp, Glu, Phe, Gly, His, Leu, Asn, Arg, Ser, Thr, Val or Tyr
  MOD_RES (15)...(15): Xaa = Ala, Asp, Glu, Gly, Asn, Pro, Gln, Arg, Ser or Thr
  MOD_RES (16)...(16): Xaa = Ala, Asp, Glu, Phe, Gly, Lys, Leu, Asn, Pro, Gln, Arg, Ser or Thr
  MOD_RES (17)...(17): Xaa = Ala, Asp, Glu, Gly, Met, Asn, Arg, Ser, Thr, Val or Tyr
  MOD_RES (18)...(18): Xaa = Ala, Asp, Glu, Gly, Lys, Leu, Met, Gln, Arg, Ser or Thr
  MOD_RES (19)...(19): Xaa = Phe, His, Ile, Pro, Arg, Val, Trp or Tyr
  MOD_RES (20)...(20): Xaa = Ala, Glu, His, Lys, Leu, Gln, Ser, Thr, Val or Tyr
  MOD_RES (22)...(22): Xaa = Ala, Asp, Glu, Phe, Gly, His, Ile, Lys, Leu, Met, Asn, Pro, Gln, Arg, Ser, Thr, Val, Trp or Tyr
  MOD_RES (24)...(24): Xaa = Ala, Asp, Glu, Phe, His, Lys, Leu, Met, Asn, Pro, Gln, Arg, Ser, Thr, Val, Trp or Tyr
  MOD_RES (25)...(25): Xaa = Ala, Asp, Glu, Phe, Gly, His, Lys, Leu, Asn, Pro, Gln, Arg, Ser, Thr, Val or Tyr
  MOD_RES (26)...(26): Xaa = Ala, Glu, Gly, His, Lys, Leu, Asn, Pro, Arg, Ser, Thr or Tyr
  MOD_RES (27)...(27): Xaa = Phe, His, Ile, Leu, Met, Arg, Thr, Trp or Tyr
  MOD_RES (28)...(28): Xaa = Ala, Asp, Glu, Phe, Gly, His, Ile, Lys, Leu, Met, Asn, Gln, Arg, Ser, Thr, Val or Tyr
  MOD_RES (29)...(29): Xaa = Asp, Gly or Ser
  MOD_RES (30)...(30): Xaa = Ala, Asp, Glu, Phe, His, Ile, Lys, Leu, Asn, Pro, Gln, Arg, Ser, Thr, Val or Tyr
  MOD_RES (31)...(31): Xaa = Ala, Asp, Glu, Phe, His, Ile, Lys, Leu, Met, Asn, Gln, Arg, Ser, Thr or Tyr
CXXXXXCXXXCXXXXXXXXXCXCXXXXXXXXC

SEQ ID NO: 284 - protein, 33 aa, Artificial Sequence
  EGF domain monomer sequence
  MOD_RES (2)...(2): Xaa = Ala, Asp, Glu, Gly, Ile, Lys, Leu, Gln, Arg, Ser, Thr or Val
  MOD_RES (3)...(3): Xaa = Ala, Asp, Glu, Phe, Gly, His, Ile, Lys, Leu, Met, Asn, Pro, Gln, Arg, Ser, Thr or Val
  MOD_RES (4)...(4): Xaa = Ala, Glu, Phe, Gly, His, Leu, Asn, Pro, Gln, Arg, Ser, Thr, Trp or Tyr
  MOD_RES (5)...(5): Xaa = Ala, Asp, Glu, Phe, Gly, His, Ile, Lys, Leu, Asn, Pro, Arg, Ser or Thr
  MOD_RES (6)...(6): Xaa = Ala, Phe, Gly, Ile, Lys, Leu, Met, Asn, Pro, Gln, Arg, Ser, Thr, Val or Tyr
  MOD_RES (8)...(8): Xaa = Ala, Asp, Glu, Gly, His, Lys, Asn, Pro, Gln, Ser, Thr or Val
  MOD_RES (9)...(9): Xaa = Phe, Gly, His, Leu, Asn, Gln, Ser, Thr or Tyr
  MOD_RES (10)...(10): Xaa = Ala, Asp, Glu, Phe, Gly, His, Ile, Lys, Leu, Asn, Gln, Arg, Ser, Thr, Val or Tyr
  MOD_RES (12)...(12): Xaa = Ala, Asp, Phe, His, Ile, Lys, Leu, Met, Asn, Gln, Arg, Ser, Thr, Val or Tyr
  MOD_RES (13)...(13): Xaa = Ala, Asp, Glu, Phe, His, Leu, Met, Asn, Pro, Gln, Arg, Ser, Val or Tyr
  MOD_RES (14)...(14): Xaa = Ala, Asp, Glu, Phe, Gly, His, Leu, Asn, Arg, Ser, Thr, Val or Tyr
  MOD_RES (15)...(15): Xaa = Ala, Asp, Glu, Gly, Asn, Pro, Gln, Arg, Ser or Thr
  MOD_RES (16)...(16): Xaa = Ala, Asp, Glu, Phe, Gly, Lys, Leu, Asn, Pro, Gln, Arg, Ser or Thr
  MOD_RES (17)...(17): Xaa = Ala, Asp, Glu, Gly, Met, Asn, Arg, Ser, Thr, Val or Tyr
  MOD_RES (18)...(18): Xaa = Ala, Asp, Glu, Gly, Lys, Leu, Met, Gln, Arg, Ser or Thr
  MOD_RES (19)...(19): Xaa = Phe, His, Ile, Pro, Arg, Val, Trp or Tyr
  MOD_RES (20)...(20): Xaa = Ala, Glu, His, Lys, Leu, Gln, Ser, Thr, Val or Tyr
  MOD_RES (22)...(22): Xaa = Ala, Asp, Glu, Phe, Gly, His, Ile, Lys, Leu, Met, Asn, Pro, Gln, Arg, Ser, Thr, Val, Trp or Tyr
  MOD_RES (24)...(24): Xaa = Ala, Asp, Glu, Phe, Gly, His, Ile, Lys, Leu, Asn, Pro, Gln, Arg, Ser, Thr, Val or Tyr
  MOD_RES (25)...(25): Xaa = Ala, Asp, Glu, Phe, His, Ile, Lys, Leu, Met, Asn, Pro, Gln, Arg, Ser, Thr or Val
  MOD_RES (26)...(26): Xaa = Asp, Glu, Gly, Asn, Pro or Ser
  MOD_RES (27)...(27): Xaa = Ala, Asp, Glu, Phe, His, Leu, Met, Gln, Arg, Ser, Thr, Trp or Tyr
  MOD_RES (28)...(28): Xaa = Ala, Asp, Glu, Phe, Gly, His, Ile, Lys, Leu, Met, Asn, Gln, Arg, Ser, Thr, Val or Tyr
  MOD_RES (29)...(29): Xaa = Ala, Phe, Gly, Ile, Lys, Leu, Met, Pro, Gln, Arg, Ser, Thr, Val, Trp or Tyr
  MOD_RES (30)...(30): Xaa = Ala, Asp, Glu, Phe, Gly, His, Lys, Leu, Met, Asn, Pro, Gln, Arg, Ser, Thr, Val or Trp
  MOD_RES (31)...(31): Xaa = Ala, Asp, Glu, Gly, Ile, Lys, Leu, Met, Asn, Pro, Gln, Arg, Ser, Thr, Val or Tyr
  MOD_RES (32)...(32): Xaa = Ala, Asp, Glu, Phe, Gly, His, Ile, Lys, Leu, Met, Asn, Gln, Ser, Thr or Val
CXXXXXCXXXCXXXXXXXXXCXCXXXXXXXXXC

SEQ ID NO: 285 - protein, 34 aa, Artificial Sequence
  EGF domain monomer sequence
  MOD_RES (2)...(2): Xaa = Ala, Asp, Glu, Gly, Ile, Lys, Leu, Gln, Arg, Ser, Thr or Val
  MOD_RES (3)...(3): Xaa = Ala, Asp, Glu, Phe, Gly, His, Ile, Lys, Leu, Met, Asn, Pro, Gln, Arg, Ser, Thr or Val
  MOD_RES (4)...(4): Xaa = Ala, Glu, Phe, Gly, His, Leu, Asn, Pro, Gln, Arg, Ser, Thr, Trp or Tyr
  MOD_RES (5)...(5): Xaa = Ala, Asp, Glu, Phe, Gly, His, Ile, Lys, Leu, Asn, Pro, Arg, Ser or Thr
  MOD_RES (6)...(6): Xaa = Ala, Phe, Gly, Ile, Lys, Leu, Met, Asn, Pro, Gln, Arg, Ser, Thr, Val or Tyr
  MOD_RES (8)...(8): Xaa = Ala, Asp, Glu, Gly, His, Lys, Asn, Pro, Gln, Ser, Thr or Val
  MOD_RES (9)...(9): Xaa = Phe, Gly, His, Leu, Asn, Gln, Ser, Thr or Tyr
  MOD_RES (10)...(10): Xaa = Ala, Asp, Glu, Phe, Gly, His, Ile, Lys, Leu, Asn, Gln, Arg, Ser, Thr, Val or Tyr
  MOD_RES (12)...(12): Xaa = Ala, Asp, Phe, His, Ile, Lys, Leu, Met, Asn, Gln, Arg, Ser, Thr, Val or Tyr
  MOD_RES (13)...(13): Xaa = Ala, Asp, Glu, Phe, His, Leu, Met, Asn, Pro, Gln, Arg, Ser, Val or Tyr
  MOD_RES (14)...(14): Xaa = Ala, Asp, Glu, Phe, Gly, His, Leu, Asn, Arg, Ser, Thr, Val or Tyr
  MOD_RES (15)...(15): Xaa = Ala, Asp, Glu, Gly, Asn, Pro, Gln, Arg, Ser or Thr
  MOD_RES (16)...(16): Xaa = Ala, Asp, Glu, Phe, Gly, Lys, Leu, Asn, Pro, Gln, Arg, Ser or Thr
  MOD_RES (17)...(17): Xaa = Ala, Asp, Glu, Gly, Met, Asn, Arg, Ser, Thr, Val or Tyr
  MOD_RES (18)...(18): Xaa = Ala, Asp, Glu, Gly, Lys, Leu, Met, Gln, Arg, Ser or Thr
  MOD_RES (19)...(19): Xaa = Phe, His, Ile, Pro, Arg, Val, Trp or Tyr
  MOD_RES (20)...(20): Xaa = Ala, Glu, His, Lys, Leu, Gln, Ser, Thr, Val or Tyr
  MOD_RES (22)...(22): Xaa = Ala, Asp, Glu, Phe, Gly, His, Ile, Lys, Leu, Met, Asn, Pro, Gln, Arg, Ser, Thr, Val, Trp or Tyr
  MOD_RES (24)...(24): Xaa = Ala, Asp, Glu, Phe, Gly, His, Ile, Lys, Leu, Asn, Pro, Gln, Arg, Ser, Thr, Val or Tyr
  MOD_RES (25)...(25): Xaa = Ala, Asp, Glu, Phe, His, Ile, Lys, Leu, Met, Asn, Pro, Gln, Arg, Ser, Thr or Val
  MOD_RES (26)...(26): Xaa = Asp, Glu, Gly, Asn, Pro or Ser
  MOD_RES (27)...(27): Xaa = Ala, Asp, Glu, Phe, His, Leu, Met, Gln, Arg, Ser, Thr, Trp or Tyr
  MOD_RES (28)...(28): Xaa = Ala, Asp, Glu, Phe, Gly, His, Ile, Lys, Leu, Met, Asn, Gln, Arg, Ser, Thr, Val or Tyr
  MOD_RES (29)...(29): Xaa = Ala, Phe, Gly, Ile, Lys, Leu, Met, Pro, Gln, Arg, Ser, Thr, Val, Trp or Tyr
  MOD_RES (30)...(30): Xaa = Ala, Asp, Glu, Phe, Gly, His, Lys, Leu, Met, Asn, Pro, Gln, Arg, Ser, Thr, Val or Trp
  MOD_RES (31)...(31): Xaa = Ala, Asp, Glu, Gly, Ile, Lys, Leu, Met, Asn, Pro, Gln, Arg, Ser, Thr, Val or Tyr
  MOD_RES (32)...(32): Xaa = Ala, Asp, Glu, Phe, Gly, His, Ile, Lys, Leu, Met, Asn, Gln, Ser, Thr or Val
  MOD_RES (33)...(33): Xaa = Glu, Phe, Gly, His, Ile, Lys, Leu, Met, Asn, Pro, Gln, Arg, Ser, Thr or Trp
CXXXXXCXXXCXXXXXXXXXCXCXXXXXXXXXXC

SEQ ID NO: 286 - protein, 35 aa, Artificial Sequence
  EGF domain monomer sequence
  MOD_RES (2)...(2): Xaa = Ala, Asp, Glu, Gly, Ile, Lys, Leu, Gln, Arg, Ser, Thr or Val
  MOD_RES (3)...(3): Xaa = Ala, Asp, Glu, Phe, Gly, His, Ile, Lys, Leu, Met, Asn, Pro, Gln, Arg, Ser, Thr or Val
  MOD_RES (4)...(4): Xaa = Ala, Glu, Phe, Gly, His, Leu, Asn, Pro, Gln, Arg, Ser, Thr, Trp or Tyr
  MOD_RES (5)...(5): Xaa = Ala, Asp, Glu, Phe, Gly, His, Ile, Lys, Leu, Asn, Pro, Arg, Ser or Thr
  MOD_RES (6)...(6): Xaa = Ala, Phe, Gly, Ile, Lys, Leu, Met, Asn, Pro, Gln, Arg, Ser, Thr, Val or Tyr
  MOD_RES (8)...(8): Xaa = Ala, Asp, Glu, Gly, His, Lys, Asn, Pro, Gln, Ser, Thr or Val
  MOD_RES (9)...(9): Xaa = Phe, Gly, His, Leu, Asn, Gln, Ser, Thr or Tyr
  MOD_RES (10)...(10): Xaa = Ala, Asp, Glu, Phe, Gly, His, Ile, Lys, Leu, Asn, Gln, Arg, Ser, Thr, Val or Tyr
  MOD_RES (12)...(12): Xaa = Ala, Asp, Phe, His, Ile, Lys, Leu, Met, Asn, Gln, Arg, Ser, Thr, Val or Tyr
  MOD_RES (13)...(13): Xaa = Ala, Asp, Glu, Phe, His, Leu, Met, Asn, Pro, Gln, Arg, Ser, Val or Tyr
  MOD_RES (14)...(14): Xaa = Ala, Asp, Glu, Phe, Gly, His, Leu, Asn, Arg, Ser, Thr, Val or Tyr
  MOD_RES (15)...(15): Xaa = Ala, Asp, Glu, Gly, Asn, Pro, Gln, Arg, Ser or Thr
  MOD_RES (16)...(16): Xaa = Ala, Asp, Glu, Phe, Gly, Lys, Leu, Asn, Pro, Gln, Arg, Ser or Thr
  MOD_RES (17)...(17): Xaa = Ala, Asp, Glu, Gly, Met, Asn, Arg, Ser, Thr, Val or Tyr
  MOD_RES (18)...(18): Xaa = Ala, Asp, Glu, Gly, Lys, Leu, Met, Gln, Arg, Ser or Thr
  MOD_RES (19)...(19): Xaa = Phe, His, Ile, Pro, Arg, Val, Trp or Tyr
  MOD_RES (20)...(20): Xaa = Ala, Glu, His, Lys, Leu, Gln, Ser, Thr, Val or Tyr
  MOD_RES (22)...(22): Xaa = Ala, Asp, Glu, Phe, Gly, His, Ile, Lys, Leu, Met, Asn, Pro, Gln, Arg, Ser, Thr, Val, Trp or Tyr
  MOD_RES (24)...(24): Xaa = Ala, Asp, Glu, Phe, Gly, His, Ile, Lys, Leu, Asn, Pro, Gln, Arg, Ser, Thr, Val or Tyr
  MOD_RES (25)...(25): Xaa = Ala, Asp, Glu, Phe, His, Ile, Lys, Leu, Met, Asn, Pro, Gln, Arg, Ser, Thr or Val
  MOD_RES (26)...(26): Xaa = Asp, Glu, Gly, Asn, Pro or Ser
  MOD_RES (27)...(27): Xaa = Ala, Asp, Glu, Phe, His, Leu, Met, Gln, Arg, Ser, Thr, Trp or Tyr
  MOD_RES (28)...(28): Xaa = Ala, Asp, Glu, Phe, Gly, His, Ile, Lys, Leu, Met, Asn, Gln, Arg, Ser, Thr, Val or Tyr
  MOD_RES (29)...(29): Xaa = Ala, Phe, Gly, Ile, Lys, Leu, Met, Pro, Gln, Arg, Ser, Thr, Val, Trp or Tyr
  MOD_RES (30)...(30): Xaa = Ala, Asp, Glu, Phe, Gly, His, Lys, Leu, Met, Asn, Pro, Gln, Arg, Ser, Thr, Val or Trp
  MOD_RES (31)...(31): Xaa = Ala, Asp, Glu, Gly, Ile, Lys, Leu, Met, Asn, Pro, Gln, Arg, Ser, Thr, Val or Tyr
  MOD_RES (32)...(32): Xaa = Ala, Asp, Glu, Phe, Gly, His, Ile, Lys, Leu, Met, Asn, Gln, Ser, Thr or Val
  MOD_RES (33)...(33): Xaa = Glu, Phe, Gly, His, Ile, Lys, Leu, Met, Asn, Pro, Gln, Arg, Ser, Thr or Trp
  MOD_RES (34)...(34): Xaa = Ala, Asp, Glu, Phe, Gly, His, Lys, Leu, Met, Asn, Pro, Gln, Arg, Ser, Thr, Val or Tyr
CXXXXXCXXXCXXXXXXXXXCXCXXXXXXXXXXXC

SEQ ID NO: 287 - protein, 36 aa, Artificial Sequence
  EGF domain monomer sequence
  MOD_RES (2)...(2): Xaa = Ala, Asp, Glu, Gly, Ile, Lys, Leu, Gln, Arg, Ser, Thr or Val
  MOD_RES (3)...(3): Xaa = Ala, Asp, Glu, Phe, Gly, His, Ile, Lys, Leu, Met, Asn, Pro, Gln, Arg, Ser, Thr or Val
  MOD_RES (4)...(4): Xaa = Ala, Glu, Phe, Gly, His, Leu, Asn, Pro, Gln, Arg, Ser, Thr, Trp or Tyr
  MOD_RES (5)...(5): Xaa = Ala, Asp, Glu, Phe, Gly, His, Ile, Lys, Leu, Asn, Pro, Arg, Ser or Thr
  MOD_RES (6)...(6): Xaa = Ala, Phe, Gly, Ile, Lys, Leu, Met, Asn, Pro, Gln, Arg, Ser, Thr, Val or Tyr
  MOD_RES (8)...(8): Xaa = Ala, Asp, Glu, Gly, His, Lys, Asn, Pro, Gln, Ser, Thr or Val
  MOD_RES (9)...(9): Xaa = Phe, Gly, His, Leu, Asn, Gln, Ser, Thr or Tyr
  MOD_RES (10)...(10): Xaa = Ala, Asp, Glu, Phe, Gly, His, Ile, Lys, Leu, Asn, Gln, Arg, Ser, Thr, Val or Tyr
  MOD_RES (12)...(12): Xaa = Ala, Asp, Phe, His, Ile, Lys, Leu, Met, Asn, Gln, Arg, Ser, Thr, Val or Tyr
  MOD_RES (13)...(13): Xaa = Ala, Asp, Glu, Phe, His, Leu, Met, Asn, Pro, Gln, Arg, Ser, Val or Tyr
  MOD_RES (14)...(14): Xaa = Ala, Asp, Glu, Phe, Gly, His, Leu, Asn, Arg, Ser, Thr, Val or Tyr
  MOD_RES (15)...(15): Xaa = Ala, Asp, Glu, Gly, Asn, Pro, Gln, Arg, Ser or Thr
  MOD_RES (16)...(16): Xaa = Ala, Asp, Glu, Phe, Gly, Lys, Leu, Asn, Pro, Gln, Arg, Ser or Thr
  MOD_RES (17)...(17): Xaa = Ala, Asp, Glu, Gly, Met, Asn, Arg, Ser, Thr, Val or Tyr
  MOD_RES (18)...(18): Xaa = Ala, Asp, Glu, Gly, Lys, Leu, Met, Gln, Arg, Ser or Thr
  MOD_RES (19)...(19): Xaa = Phe, His, Ile, Pro, Arg, Val, Trp or Tyr
  MOD_RES (20)...(20): Xaa = Ala, Glu, His, Lys, Leu, Gln, Ser, Thr, Val or Tyr
  MOD_RES (22)...(22): Xaa = Ala, Asp, Glu, Phe, Gly, His, Ile, Lys, Leu, Met, Asn, Pro, Gln, Arg, Ser, Thr, Val, Trp or Tyr
  MOD_RES (24)...(24): Xaa = Ala, Asp, Glu, Phe, Gly, His, Ile, Lys, Leu, Asn, Pro, Gln, Arg, Ser, Thr, Val or Tyr
  MOD_RES (25)...(25): Xaa = Ala, Asp, Glu, Phe, His, Ile, Lys, Leu, Met, Asn, Pro, Gln, Arg, Ser, Thr or Val
  MOD_RES (26)...(26): Xaa = Asp, Glu, Gly, Asn, Pro or Ser
  MOD_RES (27)...(27): Xaa = Ala, Asp, Glu, Phe, His, Leu, Met, Gln, Arg, Ser, Thr, Trp or Tyr
  MOD_RES (28)...(28): Xaa = Ala, Asp, Glu, Phe, Gly, His, Ile, Lys, Leu, Met, Asn, Gln, Arg, Ser, Thr, Val or Tyr
  MOD_RES (29)...(29): Xaa = Ala, Phe, Gly, Ile, Lys, Leu, Met, Pro, Gln, Arg, Ser, Thr, Val, Trp or Tyr
  MOD_RES (30)...(30): Xaa = Ala, Asp, Glu, Phe, Gly, His, Lys, Leu, Met, Asn, Pro, Gln, Arg, Ser, Thr, Val or Trp
  MOD_RES (31)...(31): Xaa = Ala, Asp, Glu, Gly, Ile, Lys, Leu, Met, Asn, Pro, Gln, Arg, Ser, Thr, Val or Tyr
  MOD_RES (32)...(32): Xaa = Ala, Asp, Glu, Phe, Gly, His, Ile, Lys, Leu, Met, Asn, Gln, Ser, Thr or Val
  MOD_RES (33)...(33): Xaa = Glu, Phe, Gly, His, Ile, Lys, Leu, Met, Asn, Pro, Gln, Arg, Ser, Thr or Trp
  MOD_RES (34)...(34): Xaa = Ala, Asp, Glu, Phe, Gly, His, Lys, Leu, Met, Asn, Pro, Gln, Arg, Ser, Thr, Val or Tyr
  MOD_RES (35)...(35): Xaa = Ala, Asp, Glu, Phe, Gly, His, Ile, Lys, Met, Asn, Gln, Arg, Ser, Thr, Val or Tyr
CXXXXXCXXXCXXXXXXXXXCXCXXXXXXXXXXXXC

SEQ ID NO: 288 - protein, 33 aa, Artificial Sequence
  EGF domain monomer sequence
  MOD_RES (2)...(2): Xaa = Ala, Asp, Glu, Phe, Gly, Ile, Lys, Leu, Met, Asn, Pro, Gln, Arg, Ser, Thr, Val or Tyr
  MOD_RES (3)...(3): Xaa = Ala, Asp, Glu, Phe, Gly, His, Ile, Lys, Leu, Met, Asn, Pro, Gln, Arg, Ser, Thr, Val or Tyr
  MOD_RES (4)...(4): Xaa = Ala, Asp, Glu, Phe, Gly, His, Ile, Lys, Leu, Met, Asn, Pro, Gln, Arg, Ser, Thr, Val or Trp
  MOD_RES (5)...(5): Xaa = Ala, Asp, Glu, Phe, Gly, His, Ile, Lys, Leu, Met, Asn, Pro, Gln, Arg, Ser, Thr or Val
  MOD_RES (6)...(6): Xaa = Ala, Asp, Glu, Phe, Gly, His, Ile, Lys, Leu, Asn, Pro, Gln, Arg, Ser, Val or Tyr
  MOD_RES (7)...(7): Xaa = Ala, Asp, Glu, Gly, Ile, Lys, Leu, Met, Asn, Pro, Gln, Arg, Ser, Thr, Val or Tyr
  MOD_RES (9)...(9): Xaa = Ala, Asp, Glu, Gly, His, Lys, Asn, Pro, Gln, Ser, Thr or Val
  MOD_RES (10)...(10): Xaa = Phe, Gly, His, Leu, Asn, Gln, Ser, Thr or Tyr
  MOD_RES (11)...(11): Xaa = Ala, Asp, Glu, Phe, Gly, His, Ile, Lys, Leu, Asn, Gln, Arg, Ser, Thr, Val or Tyr
  MOD_RES (13)...(13): Xaa = Ala, Asp, Phe, His, Ile, Lys, Leu, Met, Asn, Gln, Arg, Ser, Thr, Val or Tyr
  MOD_RES (14)...(14): Xaa = Ala, Asp, Glu, Phe, His, Leu, Met, Asn, Pro, Gln, Arg, Ser, Val or Tyr
  MOD_RES (15)...(15): Xaa = Ala, Asp, Glu, Phe, Gly, His, Leu, Asn, Arg, Ser, Thr, Val or Tyr
  MOD_RES (16)...(16): Xaa = Ala, Asp, Glu, Gly, Asn, Pro, Gln, Arg, Ser or Thr
  MOD_RES (17)...(17): Xaa = Ala, Asp, Glu, Phe, Gly, Lys, Leu, Asn, Pro, Gln, Arg, Ser or Thr
  MOD_RES (18)...(18): Xaa = Ala, Asp, Glu, Gly, Met, Asn, Arg, Ser, Thr, Val or Tyr
  MOD_RES (19)...(19): Xaa = Ala, Asp, Glu, Gly, Lys, Leu, Met, Gln, Arg, Ser or Thr
  MOD_RES (20)...(20): Xaa = Phe, His, Ile, Pro, Arg, Val, Trp or Tyr
  MOD_RES (21)...(21): Xaa = Ala, Glu, His, Lys, Leu, Gln, Ser, Thr, Val or Tyr
  MOD_RES (23)...(23): Xaa = Ala, Asp, Glu, Phe, Gly, His, Ile, Lys, Leu, Met, Asn, Pro, Gln, Arg, Ser, Thr, Val, Trp or Tyr
  MOD_RES (25)...(25): Xaa = Ala, Asp, Glu, Phe, His, Lys, Leu, Met, Asn, Pro, Gln, Arg, Ser, Thr, Val, Trp or Tyr
  MOD_RES (26)...(26): Xaa = Ala, Asp, Glu, Phe, Gly, His, Lys, Leu, Asn, Pro, Gln, Arg, Ser, Thr, Val or Tyr
  MOD_RES (27)...(27): Xaa = Ala, Glu, Gly, His, Lys, Leu, Asn, Pro, Arg, Ser, Thr or Tyr
  MOD_RES (28)...(28): Xaa = Phe, His, Ile, Leu, Met, Arg, Thr, Trp or Tyr
  MOD_RES (29)...(29): Xaa = Ala, Asp, Glu, Phe, Gly, His, Ile, Lys, Leu, Met, Asn, Gln, Arg, Ser, Thr, Val or Tyr
  MOD_RES (30)...(30): Xaa = Asp, Gly or Ser
  MOD_RES (31)...(31): Xaa = Ala, Asp, Glu, Phe, His, Ile, Lys, Leu, Asn, Pro, Gln, Arg, Ser, Thr, Val or Tyr
  MOD_RES (32)...(32): Xaa = Ala, Asp, Glu, Phe, His, Ile, Lys, Leu, Met, Asn, Gln, Arg, Ser, Thr or Tyr
CXXXXXXCXXXCXXXXXXXXXCXCXXXXXXXXC

SEQ ID NO: 289 - protein, 34 aa, Artificial Sequence
  EGF domain monomer sequence
  MOD_RES (2)...(2): Xaa = Ala, Asp, Glu, Phe, Gly, Ile, Lys, Leu, Met, Asn, Pro, Gln, Arg, Ser, Thr, Val or Tyr
  MOD_RES (3)...(3): Xaa = Ala, Asp, Glu, Phe, Gly, His, Ile, Lys, Leu, Met, Asn, Pro, Gln, Arg, Ser, Thr, Val or Tyr
  MOD_RES (4)...(4): Xaa = Ala, Asp, Glu, Phe, Gly, His, Ile, Lys, Leu, Met, Asn, Pro, Gln, Arg, Ser, Thr, Val or Trp
  MOD_RES (5)...(5): Xaa = Ala, Asp, Glu, Phe, Gly, His, Ile, Lys, Leu, Met, Asn, Pro, Gln, Arg, Ser, Thr or Val
  MOD_RES (6)...(6): Xaa = Ala, Asp, Glu, Phe, Gly, His, Ile, Lys, Leu, Asn, Pro, Gln, Arg, Ser, Val or Tyr
  MOD_RES (7)...(7): Xaa = Ala, Asp, Glu, Gly, Ile, Lys, Leu, Met, Asn, Pro, Gln, Arg, Ser, Thr, Val or Tyr
  MOD_RES (9)...(9): Xaa = Ala, Asp, Glu, Gly, His, Lys, Asn, Pro, Gln, Ser, Thr or Val
  MOD_RES (10)...(10): Xaa = Phe, Gly, His, Leu, Asn, Gln, Ser, Thr or Tyr
  MOD_RES (11)...(11): Xaa = Ala, Asp, Glu, Phe, Gly, His, Ile, Lys, Leu, Asn, Gln, Arg, Ser, Thr, Val or Tyr
  MOD_RES (13)...(13): Xaa = Ala, Asp, Phe, His, Ile, Lys, Leu, Met, Asn, Gln, Arg, Ser, Thr, Val or Tyr
  MOD_RES (14)...(14): Xaa = Ala, Asp, Glu, Phe, His, Leu, Met, Asn, Pro, Gln, Arg, Ser, Val or Tyr
  MOD_RES (15)...(15): Xaa = Ala, Asp, Glu, Phe, Gly, His, Leu, Asn, Arg, Ser, Thr, Val or Tyr
  MOD_RES (16)...(16): Xaa = Ala, Asp, Glu, Gly, Asn, Pro, Gln, Arg, Ser or Thr
  MOD_RES (17)...(17): Xaa = Ala, Asp, Glu, Phe, Gly, Lys, Leu, Asn, Pro, Gln, Arg, Ser or Thr
  MOD_RES (18)...(18): Xaa = Ala, Asp, Glu, Gly, Met, Asn, Arg, Ser, Thr, Val or Tyr
  MOD_RES (19)...(19): Xaa = Ala, Asp, Glu, Gly, Lys, Leu, Met, Gln, Arg, Ser or Thr
  MOD_RES (20)...(20): Xaa = Phe, His, Ile, Pro, Arg, Val, Trp or Tyr
  MOD_RES (21)...(21): Xaa = Ala, Glu, His, Lys, Leu, Gln, Ser, Thr, Val or Tyr
  MOD_RES (23)...(23): Xaa = Ala, Asp, Glu, Phe, Gly, His, Ile, Lys, Leu, Met, Asn, Pro, Gln, Arg, Ser, Thr, Val, Trp or Tyr
  MOD_RES (25)...(25): Xaa = Ala, Asp, Glu, Phe, Gly, His, Ile, Lys, Leu, Asn, Pro, Gln, Arg, Ser, Thr, Val or Tyr
  MOD_RES (26)...(26): Xaa = Ala, Asp, Glu, Phe, His, Ile, Lys, Leu, Met, Asn, Pro, Gln, Arg, Ser, Thr or Val
  MOD_RES (27)...(27): Xaa = Asp, Glu, Gly, Asn, Pro or Ser
  MOD_RES (28)...(28): Xaa = Ala, Asp, Glu, Phe, His, Leu, Met, Gln, Arg, Ser, Thr, Trp or Tyr
  MOD_RES (29)...(29): Xaa = Ala, Asp, Glu, Phe, Gly, His, Ile, Lys, Leu, Met, Asn, Gln, Arg, Ser, Thr, Val or Tyr
  MOD_RES (30)...(30): Xaa = Ala, Phe, Gly, Ile, Lys, Leu, Met, Pro, Gln, Arg, Ser, Thr, Val, Trp or Tyr
  MOD_RES (31)...(31): Xaa = Ala, Asp, Glu, Phe, Gly, His, Lys, Leu, Met, Asn, Pro, Gln, Arg, Ser, Thr, Val or Trp
  MOD_RES (32)...(32): Xaa = Ala, Asp, Glu, Gly, Ile, Lys, Leu, Met, Asn, Pro, Gln, Arg, Ser, Thr, Val or Tyr
  MOD_RES (33)...(33): Xaa = Ala, Asp, Glu, Phe, Gly, His, Ile, Lys, Leu, Met, Asn, Gln, Ser, Thr or Val
CXXXXXXCXXXCXXXXXXXXXCXCXXXXXXXXXC

SEQ ID NO: 290 - protein, 35 aa, Artificial Sequence
  EGF domain monomer sequence
  MOD_RES (2)...(2): Xaa = Ala, Asp, Glu, Phe, Gly, Ile, Lys, Leu, Met, Asn, Pro, Gln, Arg, Ser, Thr, Val or Tyr
  MOD_RES (3)...(3): Xaa = Ala, Asp, Glu, Phe, Gly, His, Ile, Lys, Leu, Met, Asn, Pro, Gln, Arg, Ser, Thr, Val or Tyr
  MOD_RES (4)...(4): Xaa = Ala, Asp, Glu, Phe, Gly, His, Ile, Lys, Leu, Met, Asn, Pro, Gln, Arg, Ser, Thr, Val or Trp
  MOD_RES (5)...(5): Xaa = Ala, Asp, Glu, Phe, Gly, His, Ile, Lys, Leu, Met, Asn, Pro, Gln, Arg, Ser, Thr or Val
  MOD_RES (6)...(6): Xaa = Ala, Asp, Glu, Phe, Gly, His, Ile, Lys, Leu, Asn, Pro, Gln, Arg, Ser, Val or Tyr
  MOD_RES (7)...(7): Xaa = Ala, Asp, Glu, Gly, Ile, Lys, Leu, Met, Asn, Pro, Gln, Arg, Ser, Thr, Val or Tyr
  MOD_RES (9)...(9): Xaa = Ala, Asp, Glu, Gly, His, Lys, Asn, Pro, Gln, Ser, Thr or Val
  MOD_RES (10)...(10): Xaa = Phe, Gly, His, Leu, Asn, Gln, Ser, Thr or Tyr
  MOD_RES (11)...(11): Xaa = Ala, Asp, Glu, Phe, Gly, His, Ile, Lys, Leu, Asn, Gln, Arg, Ser, Thr, Val or Tyr
  MOD_RES (13)...(13): Xaa = Ala, Asp, Phe, His, Ile, Lys, Leu, Met, Asn, Gln, Arg, Ser, Thr, Val or Tyr
  MOD_RES (14)...(14): Xaa = Ala, Asp, Glu, Phe, His, Leu, Met, Asn, Pro, Gln, Arg, Ser, Val or Tyr
  MOD_RES (15)...(15): Xaa = Ala, Asp, Glu, Phe, Gly, His, Leu, Asn, Arg, Ser, Thr, Val or Tyr
  MOD_RES (16)...(16): Xaa = Ala, Asp, Glu, Gly, Asn, Pro, Gln, Arg, Ser or Thr
  MOD_RES (17)...(17): Xaa = Ala, Asp, Glu, Phe, Gly, Lys, Leu, Asn, Pro, Gln, Arg, Ser or Thr
  MOD_RES (18)...(18): Xaa = Ala, Asp, Glu, Gly, Met, Asn, Arg, Ser, Thr, Val or Tyr
  MOD_RES (19)...(19): Xaa = Ala, Asp, Glu, Gly, Lys, Leu, Met, Gln, Arg, Ser or Thr
  MOD_RES (20)...(20): Xaa = Phe, His, Ile, Pro, Arg, Val, Trp or Tyr
  MOD_RES (21)...(21): Xaa = Ala, Glu, His, Lys, Leu, Gln, Ser, Thr, Val or Tyr
  MOD_RES (23)...(23): Xaa = Ala, Asp, Glu, Phe, Gly, His, Ile, Lys, Leu, Met, Asn, Pro, Gln, Arg, Ser, Thr, Val, Trp or Tyr
  MOD_RES (25)...(25): Xaa = Ala, Asp, Glu, Phe, Gly, His, Ile, Lys, Leu, Asn, Pro, Gln, Arg, Ser, Thr, Val or Tyr
  MOD_RES (26)...(26): Xaa = Ala, Asp, Glu, Phe, His, Ile, Lys, Leu, Met, Asn, Pro, Gln, Arg, Ser, Thr or Val
  MOD_RES (27)...(27): Xaa = Asp, Glu, Gly, Asn, Pro or Ser
  MOD_RES (28)...(28): Xaa = Ala, Asp, Glu, Phe, His, Leu, Met, Gln, Arg, Ser, Thr, Trp or Tyr
  MOD_RES (29)...(29): Xaa = Ala, Asp, Glu, Phe, Gly, His, Ile, Lys, Leu, Met, Asn, Gln, Arg, Ser, Thr, Val or Tyr
  MOD_RES (30)...(30): Xaa = Ala, Phe, Gly, Ile, Lys, Leu, Met, Pro, Gln, Arg, Ser, Thr, Val, Trp or Tyr
  MOD_RES (31)...(31): Xaa = Ala, Asp, Glu, Phe, Gly, His, Lys, Leu, Met, Asn, Pro, Gln, Arg, Ser, Thr, Val or Trp
  MOD_RES (32)...(32): Xaa = Ala, Asp, Glu, Gly, Ile, Lys, Leu, Met, Asn, Pro, Gln, Arg, Ser, Thr, Val or Tyr
  MOD_RES (33)...(33): Xaa = Ala, Asp, Glu, Phe, Gly, His, Ile, Lys, Leu, Met, Asn, Gln, Ser, Thr or Val
  MOD_RES (34)...(34): Xaa = Glu, Phe, Gly, His, Ile, Lys, Leu, Met, Asn, Pro, Gln, Arg, Ser, Thr or Trp
CXXXXXXCXXXCXXXXXXXXXCXCXXXXXXXXXXC

SEQ ID NO: 291 - protein, 36 aa, Artificial Sequence
  EGF domain monomer sequence
  MOD_RES (2)...(2): Xaa = Ala, Asp, Glu, Phe, Gly, Ile, Lys, Leu, Met, Asn, Pro, Gln, Arg, Ser, Thr, Val or Tyr
  MOD_RES (3)...(3): Xaa = Ala, Asp, Glu, Phe, Gly, His, Ile, Lys, Leu, Met, Asn, Pro, Gln, Arg, Ser, Thr, Val or Tyr
  MOD_RES (4)...(4): Xaa = Ala, Asp, Glu, Phe, Gly, His, Ile, Lys, Leu, Met, Asn, Pro, Gln, Arg, Ser, Thr, Val or Trp
  MOD_RES (5)...(5): Xaa = Ala, Asp, Glu, Phe, Gly, His, Ile, Lys, Leu, Met, Asn, Pro, Gln, Arg, Ser, Thr or Val
  MOD_RES (6)...(6): Xaa = Ala, Asp, Glu, Phe, Gly, His, Ile, Lys, Leu, Asn, Pro, Gln, Arg, Ser, Val or Tyr
  MOD_RES (7)...(7): Xaa = Ala, Asp, Glu, Gly, Ile, Lys, Leu, Met, Asn, Pro, Gln, Arg, Ser, Thr, Val or Tyr
  MOD_RES (9)...(9): Xaa = Ala, Asp, Glu, Gly, His, Lys, Asn, Pro, Gln, Ser, Thr or Val
  MOD_RES (10)...(10): Xaa = Phe, Gly, His, Leu, Asn, Gln, Ser, Thr or Tyr
  MOD_RES (11)...(11): Xaa = Ala, Asp, Glu, Phe, Gly, His, Ile, Lys, Leu, Asn, Gln, Arg, Ser, Thr, Val or Tyr
  MOD_RES (13)...(13): Xaa = Ala, Asp, Phe, His, Ile, Lys, Leu, Met, Asn, Gln, Arg, Ser, Thr, Val or Tyr
  MOD_RES (14)...(14): Xaa = Ala, Asp, Glu, Phe, His, Leu, Met, Asn, Pro, Gln, Arg, Ser, Val or Tyr
  MOD_RES (15)...(15): Xaa = Ala, Asp, Glu, Phe, Gly, His, Leu, Asn, Arg, Ser, Thr, Val or Tyr
  MOD_RES (16)...(16): Xaa = Ala, Asp, Glu, Gly, Asn, Pro, Gln, Arg, Ser or Thr
  MOD_RES (17)...(17): Xaa = Ala, Asp, Glu, Phe, Gly, Lys, Leu, Asn, Pro, Gln, Arg, Ser or Thr
  MOD_RES (18)...(18): Xaa = Ala, Asp, Glu, Gly, Met, Asn, Arg, Ser, Thr, Val or Tyr
  MOD_RES (19)...(19): Xaa = Ala, Asp, Glu, Gly, Lys, Leu, Met, Gln, Arg, Ser or Thr
  MOD_RES (20)...(20): Xaa = Phe, His, Ile, Pro, Arg, Val, Trp or Tyr
  MOD_RES (21)...(21): Xaa = Ala, Glu, His, Lys, Leu, Gln, Ser, Thr, Val or Tyr
  MOD_RES (23)...(23): Xaa = Ala, Asp, Glu, Phe, Gly, His, Ile, Lys, Leu, Met, Asn, Pro, Gln, Arg, Ser, Thr, Val, Trp or Tyr
  MOD_RES (25)...(25): Xaa = Ala, Asp, Glu, Phe, Gly, His, Ile, Lys, Leu, Asn, Pro, Gln, Arg, Ser, Thr, Val or Tyr
  MOD_RES (26)...(26): Xaa = Ala, Asp, Glu, Phe, His, Ile, Lys, Leu, Met, Asn, Pro, Gln, Arg, Ser, Thr or Val
  MOD_RES (27)...(27): Xaa = Asp, Glu, Gly, Asn, Pro or Ser
  MOD_RES (28)...(28): Xaa = Ala, Asp, Glu, Phe, His, Leu, Met, Gln, Arg, Ser, Thr, Trp or Tyr
  MOD_RES (29)...(29): Xaa = Ala, Asp, Glu, Phe, Gly, His, Ile, Lys, Leu, Met, Asn, Gln, Arg, Ser, Thr, Val or Tyr
  MOD_RES (30)...(30): Xaa = Ala, Phe, Gly, Ile, Lys, Leu, Met, Pro, Gln, Arg, Ser, Thr, Val, Trp or Tyr
  MOD_RES (31)...(31): Xaa = Ala, Asp, Glu, Phe, Gly, His, Lys, Leu, Met, Asn, Pro, Gln, Arg, Ser, Thr, Val or Trp
  MOD_RES (32)...(32): Xaa = Ala, Asp, Glu, Gly, Ile, Lys, Leu, Met, Asn, Pro, Gln, Arg, Ser, Thr, Val or Tyr
  MOD_RES (33)...(33): Xaa = Ala, Asp, Glu, Phe, Gly, His, Ile, Lys, Leu, Met, Asn, Gln, Ser, Thr or Val
  MOD_RES (34)...(34): Xaa = Glu, Phe, Gly, His, Ile, Lys, Leu, Met, Asn, Pro, Gln, Arg, Ser, Thr or Trp
  MOD_RES (35)...(35): Xaa = Ala, Asp, Glu, Phe, Gly, His, Lys, Leu, Met, Asn, Pro, Gln, Arg, Ser, Thr, Val or Tyr
CXXXXXXCXXXCXXXXXXXXXCXCXXXXXXXXXXXC

SEQ ID NO: 292 - protein, 37 aa, Artificial Sequence
  EGF domain monomer sequence
  MOD_RES (2)...(2): Xaa = Ala, Asp, Glu, Phe, Gly, Ile, Lys, Leu, Met, Asn, Pro, Gln, Arg, Ser, Thr, Val or Tyr
  MOD_RES (3)...(3): Xaa = Ala, Asp, Glu, Phe, Gly, His, Ile, Lys, Leu, Met, Asn, Pro, Gln, Arg, Ser, Thr, Val or Tyr
  MOD_RES (4)...(4): Xaa = Ala, Asp, Glu, Phe, Gly, His, Ile, Lys, Leu, Met, Asn, Pro, Gln, Arg, Ser, Thr, Val or Trp
  MOD_RES (5)...(5): Xaa = Ala, Asp, Glu, Phe, Gly, His, Ile, Lys, Leu, Met, Asn, Pro, Gln, Arg, Ser, Thr or Val
  MOD_RES (6)...(6): Xaa = Ala, Asp, Glu, Phe, Gly, His, Ile, Lys, Leu, Asn, Pro, Gln, Arg, Ser, Val or Tyr
  MOD_RES (7)...(7): Xaa = Ala, Asp, Glu, Gly, Ile, Lys, Leu, Met, Asn, Pro, Gln, Arg, Ser, Thr, Val or Tyr
  MOD_RES (9)...(9): Xaa = Ala, Asp, Glu, Gly, His, Lys, Asn, Pro, Gln, Ser, Thr or Val
  MOD_RES (10)...(10): Xaa = Phe, Gly, His, Leu, Asn, Gln, Ser, Thr or Tyr
  MOD_RES (11)...(11): Xaa = Ala, Asp, Glu, Phe, Gly, His, Ile, Lys, Leu, Asn, Gln, Arg, Ser, Thr, Val or Tyr
  MOD_RES (13)...(13): Xaa = Ala, Asp, Phe, His, Ile, Lys, Leu, Met, Asn, Gln, Arg, Ser, Thr, Val or Tyr
  MOD_RES (14)...(14): Xaa = Ala, Asp, Glu, Phe, His, Leu, Met, Asn, Pro, Gln, Arg, Ser, Val or Tyr
  MOD_RES (15)...(15): Xaa = Ala, Asp, Glu, Phe, Gly, His, Leu, Asn, Arg, Ser, Thr, Val or Tyr
  MOD_RES (16)...(16): Xaa = Ala, Asp, Glu, Gly, Asn, Pro, Gln, Arg, Ser or Thr
  MOD_RES (17)...(17): Xaa = Ala, Asp, Glu, Phe, Gly, Lys, Leu, Asn, Pro, Gln, Arg, Ser or Thr
  MOD_RES (18)...(18): Xaa = Ala, Asp, Glu, Gly, Met, Asn, Arg, Ser, Thr, Val or Tyr
  MOD_RES (19)...(19): Xaa = Ala, Asp, Glu, Gly, Lys, Leu, Met, Gln, Arg, Ser or Thr
  MOD_RES (20)...(20): Xaa = Phe, His, Ile, Pro, Arg, Val, Trp or Tyr
  MOD_RES (21)...(21): Xaa = Ala, Glu, His, Lys, Leu, Gln, Ser, Thr, Val or Tyr
  MOD_RES (23)...(23): Xaa = Ala, Asp, Glu, Phe, Gly, His, Ile, Lys, Leu, Met, Asn, Pro, Gln, Arg, Ser, Thr, Val, Trp or Tyr
  MOD_RES (25)...(25): Xaa = Ala, Asp, Glu, Phe, Gly, His, Ile, Lys, Leu, Asn, Pro, Gln, Arg, Ser, Thr, Val or Tyr
  MOD_RES (26)...(26): Xaa = Ala, Asp, Glu, Phe, His, Ile, Lys, Leu, Met, Asn, Pro, Gln, Arg, Ser, Thr or Val
  MOD_RES (27)...(27): Xaa = Asp, Glu, Gly, Asn, Pro or Ser
  MOD_RES (28)...(28): Xaa = Ala, Asp, Glu, Phe, His, Leu, Met, Gln, Arg, Ser, Thr, Trp or Tyr
  MOD_RES (29)...(29): Xaa = Ala, Asp, Glu, Phe, Gly, His, Ile, Lys, Leu, Met, Asn, Gln, Arg, Ser, Thr, Val or Tyr
  MOD_RES (30)...(30): Xaa = Ala, Phe, Gly, Ile, Lys, Leu, Met, Pro, Gln, Arg, Ser, Thr, Val, Trp or Tyr
  MOD_RES (31)...(31): Xaa = Ala, Asp, Glu, Phe, Gly, His, Lys, Leu, Met, Asn, Pro, Gln, Arg, Ser, Thr, Val or Trp
  MOD_RES (32)...(32): Xaa = Ala, Asp, Glu, Gly, Ile, Lys, Leu, Met, Asn, Pro, Gln, Arg, Ser, Thr, Val or Tyr
  MOD_RES (33)...(33): Xaa = Ala, Asp, Glu, Phe, Gly, His, Ile, Lys, Leu, Met, Asn, Gln, Ser, Thr or Val
  MOD_RES (34)...(34): Xaa = Glu, Phe, Gly, His, Ile, Lys, Leu, Met, Asn, Pro, Gln, Arg, Ser, Thr or Trp
  MOD_RES (35)...(35): Xaa = Ala, Asp, Glu, Phe, Gly, His, Lys, Leu, Met, Asn, Pro, Gln, Arg, Ser, Thr, Val or Tyr
  MOD_RES (36)...(36): Xaa = Ala, Asp, Glu, Phe, Gly, His, Ile, Lys, Met, Asn, Gln, Arg, Ser, Thr, Val or Tyr
CXXXXXXCXXXCXXXXXXXXXCXCXXXXXXXXXXXXC

SEQ ID NO: 293 - protein, 32 aa, Artificial Sequence
  EGF domain monomer sequence
  MOD_RES (2)...(2): Xaa = Ala, Asp, Glu, Phe, Gly, His, Ile, Lys, Leu, Asn, Pro, Gln, Arg, Ser, Thr, Val or Trp
  MOD_RES (3)...(3): Xaa = Ala, Asp, Glu, Gly, His, Lys, Leu, Met, Asn, Pro, Arg, Ser, Thr or Tyr
  MOD_RES (4)...(4): Xaa = Ala, Asp, Glu, Gly, His, Lys, Leu, Met, Asn, Pro, Gln, Arg, Ser, Thr, Val or Trp
  MOD_RES (5)...(5): Xaa = Ala, Glu, Gly, Met, Asn, Pro, Gln, Arg, Ser, Thr or Tyr
  MOD_RES (7)...(7): Xaa = Ala, Asp, Glu, Phe, Gly, His, Ile, Lys, Leu, Met, Asn, Pro, Gln, Arg, Ser, Thr or Val
  MOD_RES (8)...(8): Xaa = Ala, Asp, Glu, Phe, Gly, His, Lys, Leu, Asn, Pro, Gln, Arg, Ser, Thr or Tyr
  MOD_RES (9)...(9): Xaa = Ala, Gly or Thr
  MOD_RES (10)...(10): Xaa = Ala, Asp, Glu, Phe, His, Ile, Lys, Leu, Met, Asn, Gln, Arg, Ser, Thr or Val
  MOD_RES (12)...(12): Xaa = Ala, Asp, Phe, His, Ile, Lys, Leu, Met, Asn, Gln, Arg, Ser, Thr, Val or Tyr
  MOD_RES (13)...(13): Xaa = Ala, Asp, Glu, Phe, His, Leu, Met, Asn, Pro, Gln, Arg, Ser, Val or Tyr
  MOD_RES (14)...(14): Xaa = Ala, Asp, Glu, Phe, Gly, His, Leu, Asn, Arg, Ser, Thr, Val or Tyr
  MOD_RES (15)...(15): Xaa = Ala, Asp, Glu, Gly, Asn, Pro, Gln, Arg, Ser or Thr
  MOD_RES (16)...(16): Xaa = Ala, Asp, Glu, Phe, Gly, Lys, Leu, Asn, Pro, Gln, Arg, Ser or Thr
  MOD_RES (17)...(17): Xaa = Ala, Asp, Glu, Gly, Met, Asn, Arg, Ser, Thr, Val or Tyr
  MOD_RES (18)...(18): Xaa = Ala, Asp, Glu, Gly, Lys, Leu, Met, Gln, Arg, Ser or Thr
  MOD_RES (19)...(19): Xaa = Phe, His, Ile, Pro, Arg, Val, Trp or Tyr
  MOD_RES (20)...(20): Xaa = Ala, Glu, His, Lys, Leu, Gln, Ser, Thr, Val or Tyr
  MOD_RES (22)...(22): Xaa = Ala, Asp, Glu, Phe, Gly, His, Ile, Lys, Leu, Met, Asn, Pro, Gln, Arg, Ser, Thr, Val, Trp or Tyr
  MOD_RES (24)...(24): Xaa = Ala, Asp, Glu, Phe, His, Lys, Leu, Met, Asn, Pro, Gln, Arg, Ser, Thr, Val, Trp or Tyr
  MOD_RES (25)...(25): Xaa = Ala, Asp, Glu, Phe, Gly, His, Lys, Leu, Asn, Pro, Gln, Arg, Ser, Thr, Val or Tyr
  MOD_RES (26)...(26): Xaa = Ala, Glu, Gly, His, Lys, Leu, Asn, Pro, Arg, Ser, Thr or Tyr
  MOD_RES (27)...(27): Xaa = Phe, His, Ile, Leu, Met, Arg, Thr, Trp or Tyr
  MOD_RES (28)...(28): Xaa = Ala, Asp, Glu, Phe, Gly, His, Ile, Lys, Leu, Met, Asn, Gln, Arg, Ser, Thr, Val or Tyr
  MOD_RES (29)...(29): Xaa = Asp, Gly or Ser
  MOD_RES (30)...(30): Xaa = Ala, Asp, Glu, Phe, His, Ile, Lys, Leu, Asn, Pro, Gln, Arg, Ser, Thr, Val or Tyr
  MOD_RES (31)...(31): Xaa = Ala, Asp, Glu, Phe, His, Ile, Lys, Leu, Met, Asn, Gln, Arg, Ser, Thr or Tyr
CXXXXCXXXXCXXXXXXXXXCXCXXXXXXXXC

SEQ ID NO: 294 - protein, 33 aa, Artificial Sequence
  EGF domain monomer sequence
  MOD_RES (2)...(2): Xaa = Ala, Asp, Glu, Phe, Gly, His, Ile, Lys, Leu, Asn, Pro, Gln, Arg, Ser, Thr, Val or Trp
  MOD_RES (3)...(3): Xaa = Ala, Asp, Glu, Gly, His, Lys, Leu, Met, Asn, Pro, Arg, Ser, Thr or Tyr
  MOD_RES (4)...(4): Xaa = Ala, Asp, Glu, Gly, His, Lys, Leu, Met, Asn, Pro, Gln, Arg, Ser, Thr, Val or Trp
  MOD_RES (5)...(5): Xaa = Ala, Glu, Gly, Met, Asn, Pro, Gln, Arg, Ser, Thr or Tyr
  MOD_RES (7)...(7): Xaa = Ala, Asp, Glu, Phe, Gly, His, Ile, Lys, Leu, Met, Asn, Pro, Gln, Arg, Ser, Thr or Val
  MOD_RES (8)...(8): Xaa = Ala, Asp, Glu, Phe, Gly, His, Lys, Leu, Asn, Pro, Gln, Arg, Ser, Thr or Tyr
  MOD_RES (9)...(9): Xaa = Ala, Gly or Thr
  MOD_RES (10)...(10): Xaa = Ala, Asp, Glu, Phe, His, Ile, Lys, Leu, Met, Asn, Gln, Arg, Ser, Thr or Val
  MOD_RES (12)...(12): Xaa = Ala, Asp, Phe, His, Ile, Lys, Leu, Met, Asn, Gln, Arg, Ser, Thr, Val or Tyr
  MOD_RES (13)...(13): Xaa = Ala, Asp, Glu, Phe, His, Leu, Met, Asn, Pro, Gln, Arg, Ser, Val or Tyr
  MOD_RES (14)...(14): Xaa = Ala, Asp, Glu, Phe, Gly, His, Leu, Asn, Arg, Ser, Thr, Val or Tyr
  MOD_RES (15)...(15): Xaa = Ala, Asp, Glu, Gly, Asn, Pro, Gln, Arg, Ser or Thr
  MOD_RES (16)...(16): Xaa = Ala, Asp, Glu, Phe, Gly, Lys, Leu, Asn, Pro, Gln, Arg, Ser or Thr
  MOD_RES (17)...(17): Xaa = Ala, Asp, Glu, Gly, Met, Asn, Arg, Ser, Thr, Val or Tyr
  MOD_RES (18)...(18): Xaa = Ala, Asp, Glu, Gly, Lys, Leu, Met, Gln, Arg, Ser or Thr
  MOD_RES (19)...(19): Xaa = Phe, His, Ile, Pro, Arg, Val, Trp or Tyr
  MOD_RES (20)...(20): Xaa = Ala, Glu, His, Lys, Leu, Gln, Ser, Thr, Val or Tyr
  MOD_RES (22)...(22): Xaa = Ala, Asp, Glu, Phe, Gly, His, Ile, Lys, Leu, Met, Asn, Pro, Gln, Arg, Ser, Thr, Val, Trp or Tyr
  MOD_RES (24)...(24): Xaa = Ala, Asp, Glu, Phe, Gly, His, Ile, Lys, Leu, Asn, Pro, Gln, Arg, Ser, Thr, Val or Tyr
  MOD_RES (25)...(25): Xaa = Ala, Asp, Glu, Phe, His, Ile, Lys, Leu, Met, Asn, Pro, Gln, Arg, Ser, Thr or Val
  MOD_RES (26)...(26): Xaa = Asp, Glu, Gly, Asn, Pro or Ser
  MOD_RES (27)...(27): Xaa = Ala, Asp, Glu, Phe, His, Leu, Met, Gln, Arg, Ser, Thr, Trp or Tyr
  MOD_RES (28)...(28): Xaa = Ala, Asp, Glu, Phe, Gly, His, Ile, Lys, Leu, Met, Asn, Gln, Arg, Ser, Thr, Val or Tyr
  MOD_RES (29)...(29): Xaa = Ala, Phe, Gly, Ile, Lys, Leu, Met, Pro, Gln, Arg, Ser, Thr, Val, Trp or Tyr
  MOD_RES (30)...(30): Xaa = Ala, Asp, Glu, Phe, Gly, His, Lys, Leu, Met, Asn, Pro, Gln, Arg, Ser, Thr, Val or Trp
  MOD_RES (31)...(31): Xaa = Ala, Asp, Glu, Gly, Ile, Lys, Leu, Met, Asn, Pro, Gln, Arg, Ser, Thr, Val or Tyr
  MOD_RES (32)...(32): Xaa = Ala, Asp, Glu, Phe, Gly, His, Ile, Lys, Leu, Met, Asn, Gln, Ser, Thr or Val
CXXXXCXXXXCXXXXXXXXXCXCXXXXXXXXXC

SEQ ID NO: 295 - protein, 34 aa, Artificial Sequence
  EGF domain monomer sequence
  MOD_RES (2)...(2): Xaa = Ala, Asp, Glu, Phe, Gly, His, Ile, Lys, Leu, Asn, Pro, Gln, Arg, Ser, Thr, Val or Trp
  MOD_RES (3)...(3): Xaa = Ala, Asp, Glu, Gly, His, Lys, Leu, Met, Asn, Pro, Arg, Ser, Thr or Tyr
  MOD_RES (4)...(4): Xaa = Ala, Asp, Glu, Gly, His, Lys, Leu, Met, Asn, Pro, Gln, Arg, Ser, Thr, Val or Trp
  MOD_RES (5)...(5): Xaa = Ala, Glu, Gly, Met, Asn, Pro, Gln, Arg, Ser, Thr or Tyr
  MOD_RES (7)...(7): Xaa = Ala, Asp, Glu, Phe, Gly, His, Ile, Lys, Leu, Met, Asn, Pro, Gln, Arg, Ser, Thr or Val
  MOD_RES (8)...(8): Xaa = Ala, Asp, Glu, Phe, Gly, His, Lys, Leu, Asn, Pro, Gln, Arg, Ser, Thr or Tyr
  MOD_RES (9)...(9): Xaa = Ala, Gly or Thr
  MOD_RES (10)...(10): Xaa = Ala, Asp, Glu, Phe, His, Ile, Lys, Leu, Met, Asn, Gln, Arg, Ser, Thr or Val
  MOD_RES (12)...(12): Xaa = Ala, Asp, Phe, His, Ile, Lys, Leu, Met, Asn, Gln, Arg, Ser, Thr, Val or Tyr
  MOD_RES (13)...(13): Xaa = Ala, Asp, Glu, Phe, His, Leu, Met, Asn, Pro, Gln, Arg, Ser, Val or Tyr
  MOD_RES (14)...(14): Xaa = Ala, Asp, Glu, Phe, Gly, His, Leu, Asn, Arg, Ser, Thr, Val or Tyr
  MOD_RES (15)...(15): Xaa = Ala, Asp, Glu, Gly, Asn, Pro, Gln, Arg, Ser or Thr
  MOD_RES (16)...(16): Xaa = Ala, Asp, Glu, Phe, Gly, Lys, Leu, Asn, Pro, Gln, Arg, Ser or Thr
  MOD_RES (17)...(17): Xaa = Ala, Asp, Glu, Gly, Met, Asn, Arg, Ser, Thr, Val or Tyr
  MOD_RES (18)...(18): Xaa = Ala, Asp, Glu, Gly, Lys, Leu, Met, Gln, Arg, Ser or Thr
  MOD_RES (19)...(19): Xaa = Phe, His, Ile, Pro, Arg, Val, Trp or Tyr
  MOD_RES (20)...(20): Xaa = Ala, Glu, His, Lys, Leu, Gln, Ser, Thr, Val or Tyr
  MOD_RES (22)...(22): Xaa = Ala, Asp, Glu, Phe, Gly, His, Ile, Lys, Leu, Met, Asn, Pro, Gln, Arg, Ser, Thr, Val, Trp or Tyr
  MOD_RES (24)...(24): Xaa = Ala, Asp, Glu, Phe, Gly, His, Ile, Lys, Leu, Asn, Pro, Gln, Arg, Ser, Thr, Val or Tyr
  MOD_RES (25)...(25): Xaa = Ala, Asp, Glu, Phe, His, Ile, Lys, Leu, Met, Asn, Pro, Gln, Arg, Ser, Thr or Val
  MOD_RES (26)...(26): Xaa = Asp, Glu, Gly, Asn, Pro or Ser
  MOD_RES (27)...(27): Xaa = Ala, Asp, Glu, Phe, His, Leu, Met, Gln, Arg, Ser, Thr, Trp or Tyr
  MOD_RES (28)...(28): Xaa = Ala, Asp, Glu, Phe, Gly, His, Ile, Lys, Leu, Met, Asn, Gln, Arg, Ser, Thr, Val or Tyr
  MOD_RES (29)...(29): Xaa = Ala, Phe, Gly, Ile, Lys, Leu, Met, Pro, Gln, Arg, Ser, Thr, Val, Trp or Tyr
  MOD_RES (30)...(30): Xaa = Ala, Asp, Glu, Phe, Gly, His, Lys, Leu, Met, Asn, Pro, Gln, Arg, Ser, Thr, Val or Trp
  MOD_RES (31)...(31): Xaa = Ala, Asp, Glu, Gly, Ile, Lys, Leu, Met, Asn, Pro, Gln, Arg, Ser, Thr, Val or Tyr
  MOD_RES (32)...(32): Xaa = Ala, Asp, Glu, Phe, Gly, His, Ile, Lys, Leu, Met, Asn, Gln, Ser, Thr or Val
  MOD_RES (33)...(33): Xaa = Glu, Phe, Gly, His, Ile, Lys, Leu, Met, Asn, Pro, Gln, Arg, Ser, Thr or Trp
CXXXXCXXXXCXXXXXXXXXCXCXXXXXXXXXXC

SEQ ID NO: 296 - protein, 35 aa, Artificial Sequence
  EGF domain monomer sequence
  MOD_RES (2)...(2): Xaa = Ala, Asp, Glu, Phe, Gly, His, Ile, Lys, Leu, Asn, Pro, Gln, Arg, Ser, Thr, Val or Trp
  MOD_RES (3)...(3): Xaa = Ala, Asp, Glu, Gly, His, Lys, Leu, Met, Asn, Pro, Arg, Ser, Thr or Tyr
  MOD_RES (4)...(4): Xaa = Ala, Asp, Glu, Gly, His, Lys, Leu, Met, Asn, Pro, Gln, Arg, Ser, Thr, Val or Trp
  MOD_RES (5)...(5): Xaa = Ala, Glu, Gly, Met, Asn, Pro, Gln, Arg, Ser, Thr or Tyr
  MOD_RES (7)...(7): Xaa = Ala, Asp, Glu, Phe, Gly, His, Ile, Lys, Leu, Met, Asn, Pro, Gln, Arg, Ser, Thr or Val
  MOD_RES (8)...(8): Xaa = Ala, Asp, Glu, Phe, Gly, His, Lys, Leu, Asn, Pro, Gln, Arg, Ser, Thr or Tyr
  MOD_RES (9)...(9): Xaa = Ala, Gly or Thr
  MOD_RES (10)...(10): Xaa = Ala, Asp, Glu, Phe, His, Ile, Lys, Leu, Met, Asn, Gln, Arg, Ser, Thr or Val
  MOD_RES (12)...(12): Xaa = Ala, Asp, Phe, His, Ile, Lys, Leu, Met, Asn, Gln, Arg, Ser, Thr, Val or Tyr
  MOD_RES (13)...(13): Xaa = Ala, Asp, Glu, Phe, His, Leu, Met, Asn, Pro, Gln, Arg, Ser, Val or Tyr
  MOD_RES (14)...(14): Xaa = Ala, Asp, Glu, Phe, Gly, His, Leu, Asn, Arg, Ser, Thr, Val or Tyr
  MOD_RES (15)...(15): Xaa = Ala, Asp, Glu, Gly, Asn, Pro, Gln, Arg, Ser or Thr
  MOD_RES (16)...(16): Xaa = Ala, Asp, Glu, Phe, Gly, Lys, Leu, Asn, Pro, Gln, Arg, Ser or Thr
  MOD_RES (17)...(17): Xaa = Ala, Asp, Glu, Gly, Met, Asn, Arg, Ser, Thr, Val or Tyr
  MOD_RES (18)...(18): Xaa = Ala, Asp, Glu, Gly, Lys, Leu, Met, Gln, Arg, Ser or Thr
  MOD_RES (19)...(19): Xaa = Phe, His, Ile, Pro, Arg, Val, Trp or Tyr
  MOD_RES (20)...(20): Xaa = Ala, Glu, His, Lys, Leu, Gln, Ser, Thr, Val or Tyr
  MOD_RES (22)...(22): Xaa = Ala, Asp, Glu, Phe, Gly, His, Ile, Lys, Leu, Met, Asn, Pro, Gln, Arg, Ser, Thr, Val, Trp or Tyr
  MOD_RES (24)...(24): Xaa = Ala, Asp, Glu, Phe, Gly, His, Ile, Lys, Leu, Asn, Pro, Gln, Arg, Ser, Thr, Val or Tyr
  MOD_RES (25)...(25): Xaa = Ala, Asp, Glu, Phe, His, Ile, Lys, Leu, Met, Asn, Pro, Gln, Arg, Ser, Thr or Val
  MOD_RES (26)...(26): Xaa = Asp, Glu, Gly, Asn, Pro or Ser
  MOD_RES (27)...(27): Xaa = Ala, Asp, Glu, Phe, His, Leu, Met, Gln, Arg, Ser, Thr, Trp or Tyr
  MOD_RES (28)...(28): Xaa = Ala, Asp, Glu, Phe, Gly, His, Ile, Lys, Leu, Met, Asn, Gln, Arg, Ser, Thr, Val or Tyr
  MOD_RES (29)...(29): Xaa = Ala, Phe, Gly, Ile, Lys, Leu, Met, Pro, Gln, Arg, Ser, Thr, Val, Trp or Tyr
  MOD_RES (30)...(30): Xaa = Ala, Asp, Glu, Phe, Gly, His, Lys, Leu, Met, Asn, Pro, Gln, Arg, Ser, Thr, Val or Trp
  MOD_RES (31)...(31): Xaa = Ala, Asp, Glu, Gly, Ile, Lys, Leu, Met, Asn, Pro, Gln, Arg, Ser, Thr, Val or Tyr
  MOD_RES (32)...(32): Xaa = Ala, Asp, Glu, Phe, Gly, His, Ile, Lys, Leu, Met, Asn, Gln, Ser, Thr or Val
  MOD_RES (33)...(33): Xaa = Glu, Phe, Gly, His, Ile, Lys, Leu, Met, Asn, Pro, Gln, Arg, Ser, Thr or Trp
  MOD_RES (34)...(34): Xaa = Ala, Asp, Glu, Phe, Gly, His, Lys, Leu, Met, Asn, Pro, Gln, Arg, Ser, Thr, Val or Tyr
CXXXXCXXXXCXXXXXXXXXCXCXXXXXXXXXXXC

SEQ ID NO: 297 - protein, 36 aa, Artificial Sequence
  EGF domain monomer sequence
  MOD_RES (2)...(2): Xaa = Ala, Asp, Glu, Phe, Gly, His, Ile, Lys, Leu, Asn, Pro, Gln, Arg, Ser, Thr, Val or Trp
  MOD_RES (3)...(3): Xaa = Ala, Asp, Glu, Gly, His, Lys, Leu, Met, Asn, Pro, Arg, Ser, Thr or Tyr
  MOD_RES (4)...(4): Xaa = Ala, Asp, Glu, Gly, His, Lys, Leu, Met, Asn, Pro, Gln, Arg, Ser, Thr, Val or Trp
  MOD_RES (5)...(5): Xaa = Ala, Glu, Gly, Met, Asn, Pro, Gln, Arg, Ser, Thr or Tyr
  MOD_RES (7)...(7): Xaa = Ala, Asp, Glu, Phe, Gly, His, Ile, Lys, Leu, Met, Asn, Pro, Gln, Arg, Ser, Thr or Val
  MOD_RES (8)...(8): Xaa = Ala, Asp, Glu, Phe, Gly, His, Lys, Leu, Asn, Pro, Gln, Arg, Ser, Thr or Tyr
  MOD_RES (9)...(9): Xaa = Ala, Gly or Thr
  MOD_RES (10)...(10): Xaa = Ala, Asp, Glu, Phe, His, Ile, Lys, Leu, Met, Asn, Gln, Arg, Ser, Thr or Val
  MOD_RES (12)...(12): Xaa = Ala, Asp, Phe, His, Ile, Lys, Leu, Met, Asn, Gln, Arg, Ser, Thr, Val or Tyr
  MOD_RES (13)...(13): Xaa = Ala, Asp, Glu, Phe, His, Leu, Met, Asn, Pro, Gln, Arg, Ser, Val or Tyr
  MOD_RES (14)...(14): Xaa = Ala, Asp, Glu, Phe, Gly, His, Leu, Asn, Arg, Ser, Thr, Val or Tyr
  MOD_RES (15)...(15): Xaa = Ala, Asp, Glu, Gly, Asn, Pro, Gln, Arg, Ser or Thr
  MOD_RES (16)...(16): Xaa = Ala, Asp, Glu, Phe, Gly, Lys, Leu, Asn, Pro, Gln, Arg, Ser or Thr
  MOD_RES (17)...(17): Xaa = Ala, Asp, Glu, Gly, Met, Asn, Arg, Ser, Thr, Val or Tyr
  MOD_RES (18)...(18): Xaa = Ala, Asp, Glu, Gly, Lys, Leu, Met, Gln, Arg, Ser or Thr
  MOD_RES (19)...(19): Xaa = Phe, His, Ile, Pro, Arg, Val, Trp or Tyr
  MOD_RES (20)...(20): Xaa = Ala, Glu, His, Lys, Leu, Gln, Ser, Thr, Val or Tyr
  MOD_RES (22)...(22): Xaa = Ala, Asp, Glu, Phe, Gly, His, Ile, Lys, Leu, Met, Asn, Pro, Gln, Arg, Ser, Thr, Val, Trp or Tyr
  MOD_RES (24)...(24): Xaa = Ala, Asp, Glu, Phe, Gly, His, Ile, Lys, Leu, Asn, Pro, Gln, Arg, Ser, Thr, Val or Tyr
  MOD_RES (25)...(25): Xaa = Ala, Asp, Glu, Phe, His, Ile, Lys, Leu, Met, Asn, Pro, Gln, Arg, Ser, Thr or Val
  MOD_RES (26)...(26): Xaa = Asp, Glu, Gly, Asn, Pro or Ser
  MOD_RES (27)...(27): Xaa = Ala, Asp, Glu, Phe, His, Leu, Met, Gln, Arg, Ser, Thr, Trp or Tyr
  MOD_RES (28)...(28): Xaa = Ala, Asp, Glu, Phe, Gly, His, Ile, Lys, Leu, Met, Asn, Gln, Arg, Ser, Thr, Val or Tyr
  MOD_RES (29)...(29): Xaa = Ala, Phe, Gly, Ile, Lys, Leu, Met, Pro, Gln, Arg, Ser, Thr, Val, Trp or Tyr
  MOD_RES (30)...(30): Xaa = Ala, Asp, Glu, Phe, Gly, His, Lys, Leu, Met, Asn, Pro, Gln, Arg, Ser, Thr, Val or Trp
  MOD_RES (31)...(31): Xaa = Ala, Asp, Glu, Gly, Ile, Lys, Leu, Met, Asn, Pro, Gln, Arg, Ser, Thr, Val or Tyr
  MOD_RES (32)...(32): Xaa = Ala, Asp, Glu, Phe, Gly, His, Ile, Lys, Leu, Met, Asn, Gln, Ser, Thr or Val
  MOD_RES (33)...(33): Xaa = Glu, Phe, Gly, His, Ile, Lys, Leu, Met, Asn, Pro, Gln, Arg, Ser, Thr or Trp
  MOD_RES (34)...(34): Xaa = Ala, Asp, Glu, Phe, Gly, His, Lys, Leu, Met, Asn, Pro, Gln, Arg, Ser, Thr, Val or Tyr
  MOD_RES (35)...(35): Xaa = Ala, Asp, Glu, Phe, Gly, His, Ile, Lys, Met, Asn, Gln, Arg, Ser, Thr, Val or Tyr
CXXXXCXXXXCXXXXXXXXXCXCXXXXXXXXXXXXC

SEQ ID NO: 298 - protein, 33 aa, Artificial Sequence
  EGF domain monomer sequence
  MOD_RES (2)...(2): Xaa = Ala, Asp, Glu, Phe, Gly, His, Ile, Lys, Leu, Asn, Pro, Gln, Arg, Ser, Thr, Val or Trp
  MOD_RES (3)...(3): Xaa = Ala, Asp, Glu, Gly, His, Lys, Leu, Met, Asn, Pro, Arg, Ser, Thr or Tyr
  MOD_RES (4)...(4): Xaa = Ala, Asp, Glu, Gly, His, Lys, Leu, Met, Asn, Pro, Gln, Arg, Ser, Thr, Val or Trp
  MOD_RES (5)...(5): Xaa = Ala, Glu, Gly, Met, Asn, Pro, Gln, Arg, Ser, Thr or Tyr
  MOD_RES (7)...(7): Xaa = Ala, Cys, Asp, Glu, Phe, Gly, His, Lys, Leu, Met, Asn, Pro, Gln, Arg, Ser, Val or Tyr
  MOD_RES (8)...(8): Xaa = Ala, Asp, Glu, Gly, His, Ile, Lys, Leu, Met, Asn, Pro, Gln, Arg, Ser, Thr, Val or Tyr
  MOD_RES (9)...(9): Xaa = Ala, Asp, Glu, Phe, Gly, His, Lys, Leu, Asn, Gln, Arg, Ser, Thr or Tyr
  MOD_RES (10)...(10): Xaa = Ala, Phe, Gly, His, Gln, Ser, Thr or Val
  MOD_RES (11)...(11): Xaa = Ala, Asp, Glu, Phe, His, Ile, Lys, Leu, Met, Asn, Gln, Arg, Ser, Thr or Val
  MOD_RES (13)...(13): Xaa = Ala, Asp, Phe, His, Ile, Lys, Leu, Met, Asn, Gln, Arg, Ser, Thr, Val or Tyr
  MOD_RES (14)...(14): Xaa = Ala, Asp, Glu, Phe, His, Leu, Met, Asn, Pro, Gln, Arg, Ser, Val or Tyr
  MOD_RES (15)...(15): Xaa = Ala, Asp, Glu, Phe, Gly, His, Leu, Asn, Arg, Ser, Thr, Val or Tyr
  MOD_RES (16)...(16): Xaa = Ala, Asp, Glu, Gly, Asn, Pro, Gln, Arg, Ser or Thr
  MOD_RES (17)...(17): Xaa = Ala, Asp, Glu, Phe, Gly, Lys, Leu, Asn, Pro, Gln, Arg, Ser or Thr
  MOD_RES (18)...(18): Xaa = Ala, Asp, Glu, Gly, Met, Asn, Arg, Ser, Thr, Val or Tyr
  MOD_RES (19)...(19): Xaa = Ala, Asp, Glu, Gly, Lys, Leu, Met, Gln, Arg, Ser or Thr
  MOD_RES (20)...(20): Xaa = Phe, His, Ile, Pro, Arg, Val, Trp or Tyr
  MOD_RES (21)...(21): Xaa = Ala, Glu, His, Lys, Leu, Gln, Ser, Thr, Val or Tyr
  MOD_RES (23)...(23): Xaa = Ala, Asp, Glu, Phe, Gly, His, Ile, Lys, Leu, Met, Asn, Pro, Gln, Arg, Ser, Thr, Val, Trp or Tyr
  MOD_RES (25)...(25): Xaa = Ala, Asp, Glu, Phe, His, Lys, Leu, Met, Asn, Pro, Gln, Arg, Ser, Thr, Val, Trp or Tyr
  MOD_RES (26)...(26): Xaa = Ala, Asp, Glu, Phe, Gly, His, Lys, Leu, Asn, Pro, Gln, Arg, Ser, Thr, Val or Tyr
  MOD_RES (27)...(27): Xaa = Ala, Glu, Gly, His, Lys, Leu, Asn, Pro, Arg, Ser, Thr or Tyr
  MOD_RES (28)...(28): Xaa = Phe, His, Ile, Leu, Met, Arg, Thr, Trp or Tyr
  MOD_RES (29)...(29): Xaa = Ala, Asp, Glu, Phe, Gly, His, Ile, Lys, Leu, Met, Asn, Gln, Arg, Ser, Thr, Val or Tyr
  MOD_RES (30)...(30): Xaa = Asp, Gly or Ser
  MOD_RES (31)...(31): Xaa = Ala, Asp, Glu, Phe, His, Ile, Lys, Leu, Asn, Pro, Gln, Arg, Ser, Thr, Val or Tyr
  MOD_RES (32)...(32): Xaa = Ala, Asp, Glu, Phe, His, Ile, Lys, Leu, Met, Asn, Gln, Arg, Ser, Thr or Tyr
CXXXXCXXXXXCXXXXXXXXXCXCXXXXXXXXC

SEQ ID NO: 299 - protein, 34 aa, Artificial Sequence
  EGF domain monomer sequence
  MOD_RES (2)...(2): Xaa = Ala, Asp, Glu, Phe, Gly, His, Ile, Lys, Leu, Asn, Pro, Gln, Arg, Ser, Thr, Val or Trp
  MOD_RES (3)...(3): Xaa = Ala, Asp, Glu, Gly, His, Lys, Leu, Met, Asn, Pro, Arg, Ser, Thr or Tyr
  MOD_RES (4)...(4): Xaa = Ala, Asp, Glu, Gly, His, Lys, Leu, Met, Asn, Pro, Gln, Arg, Ser, Thr, Val or Trp
  MOD_RES (5)...(5): Xaa = Ala, Glu, Gly, Met, Asn, Pro, Gln, Arg, Ser, Thr or Tyr
  MOD_RES (7)...(7): Xaa = Ala, Cys, Asp, Glu, Phe, Gly, His, Lys, Leu, Met, Asn, Pro, Gln, Arg, Ser, Val or Tyr
  MOD_RES (8)...(8): Xaa = Ala, Asp, Glu, Gly, His, Ile, Lys, Leu, Met, Asn, Pro, Gln, Arg, Ser, Thr, Val or Tyr
  MOD_RES (9)...(9): Xaa = Ala, Asp, Glu, Phe, Gly, His, Lys, Leu, Asn, Gln, Arg, Ser, Thr or Tyr
  MOD_RES (10)...(10): Xaa = Ala, Phe, Gly, His, Gln, Ser, Thr or Val
  MOD_RES (11)...(11): Xaa = Ala, Asp, Glu, Phe, His, Ile, Lys, Leu, Met, Asn, Gln, Arg, Ser, Thr or Val
  MOD_RES (13)...(13): Xaa = Ala, Asp, Phe, His, Ile, Lys, Leu, Met, Asn, Gln, Arg, Ser, Thr, Val or Tyr
  MOD_RES (14)...(14): Xaa = Ala, Asp, Glu, Phe, His, Leu, Met, Asn, Pro, Gln, Arg, Ser, Val or Tyr
  MOD_RES (15)...(15): Xaa = Ala, Asp, Glu, Phe, Gly, His, Leu, Asn, Arg, Ser, Thr, Val or Tyr
  MOD_RES (16)...(16): Xaa = Ala, Asp, Glu, Gly, Asn, Pro, Gln, Arg, Ser or Thr
  MOD_RES (17)...(17): Xaa = Ala, Asp, Glu, Phe, Gly, Lys, Leu, Asn, Pro, Gln, Arg, Ser or Thr
  MOD_RES (18)...(18): Xaa = Ala, Asp, Glu, Gly, Met, Asn, Arg, Ser, Thr, Val or Tyr
  MOD_RES (19)...(19): Xaa = Ala, Asp, Glu, Gly, Lys, Leu, Met, Gln, Arg, Ser or Thr
  MOD_RES (20)...(20): Xaa = Phe, His, Ile, Pro, Arg, Val, Trp or Tyr
  MOD_RES (21)...(21): Xaa = Ala, Glu, His, Lys, Leu, Gln, Ser, Thr, Val or Tyr
  MOD_RES (23)...(23): Xaa = Ala, Asp, Glu, Phe, Gly, His, Ile, Lys, Leu, Met, Asn, Pro, Gln, Arg, Ser, Thr, Val, Trp or Tyr
  MOD_RES (25)...(25): Xaa = Ala, Asp, Glu, Phe, Gly, His, Ile, Lys, Leu, Asn, Pro, Gln, Arg, Ser, Thr, Val or Tyr
  MOD_RES (26)...(26): Xaa = Ala, Asp, Glu, Phe, His, Ile, Lys, Leu, Met, Asn, Pro, Gln, Arg, Ser, Thr or Val
  MOD_RES (27)...(27): Xaa = Asp, Glu, Gly, Asn, Pro or Ser
  MOD_RES (28)...(28): Xaa = Ala, Asp, Glu, Phe, His, Leu, Met, Gln, Arg, Ser, Thr, Trp or Tyr
  MOD_RES (29)...(29): Xaa = Ala, Asp, Glu, Phe, Gly, His, Ile, Lys, Leu, Met, Asn, Gln, Arg, Ser, Thr, Val or Tyr
  MOD_RES (30)...(30): Xaa = Ala, Phe, Gly, Ile, Lys, Leu, Met, Pro, Gln, Arg, Ser, Thr, Val, Trp or Tyr
  MOD_RES (31)...(31): Xaa = Ala, Asp, Glu, Phe, Gly, His, Lys, Leu, Met, Asn, Pro, Gln, Arg, Ser, Thr, Val or Trp
  MOD_RES (32)...(32): Xaa = Ala, Asp, Glu, Gly, Ile, Lys, Leu, Met, Asn, Pro, Gln, Arg, Ser, Thr, Val or Tyr
  MOD_RES (33)...(33): Xaa = Ala, Asp, Glu, Phe, Gly, His, Ile, Lys, Leu, Met, Asn, Gln, Ser, Thr or Val
CXXXXCXXXXXCXXXXXXXXXCXCXXXXXXXXXC

SEQ ID NO: 300 - protein, 35 aa, Artificial Sequence
  EGF domain monomer sequence
  MOD_RES (2)...(2): Xaa = Ala, Asp, Glu, Phe, Gly, His, Ile, Lys, Leu, Asn, Pro, Gln, Arg, Ser, Thr, Val or Trp
  MOD_RES (3)...(3): Xaa = Ala, Asp, Glu, Gly, His, Lys, Leu, Met, Asn, Pro, Arg, Ser, Thr or Tyr
  MOD_RES (4)...(4): Xaa = Ala, Asp, Glu, Gly, His, Lys, Leu, Met, Asn, Pro, Gln, Arg, Ser, Thr, Val or Trp
  MOD_RES (5)...(5): Xaa = Ala, Glu, Gly, Met, Asn, Pro, Gln, Arg, Ser, Thr or Tyr
  MOD_RES (7)...(7): Xaa = Ala, Cys, Asp, Glu, Phe, Gly, His, Lys, Leu, Met, Asn, Pro, Gln, Arg, Ser, Val or Tyr
  MOD_RES (8)...(8): Xaa = Ala, Asp, Glu, Gly, His, Ile, Lys, Leu, Met, Asn, Pro, Gln, Arg, Ser, Thr, Val or Tyr
  MOD_RES (9)...(9): Xaa = Ala, Asp, Glu, Phe, Gly, His, Lys, Leu, Asn, Gln, Arg, Ser, Thr or Tyr
  MOD_RES (10)...(10): Xaa = Ala, Phe, Gly, His, Gln, Ser, Thr or Val
  MOD_RES (11)...(11): Xaa = Ala, Asp, Glu, Phe, His, Ile, Lys, Leu, Met, Asn, Gln, Arg, Ser, Thr or Val
  MOD_RES (13)...(13): Xaa = Ala, Asp, Phe, His, Ile, Lys, Leu, Met, Asn, Gln, Arg, Ser, Thr, Val or Tyr
  MOD_RES (14)...(14): Xaa = Ala, Asp, Glu, Phe, His, Leu, Met, Asn, Pro, Gln, Arg, Ser, Val or Tyr
  MOD_RES (15)...(15): Xaa = Ala, Asp, Glu, Phe, Gly, His, Leu, Asn, Arg, Ser, Thr, Val or Tyr
  MOD_RES (16)...(16): Xaa = Ala, Asp, Glu, Gly, Asn, Pro, Gln, Arg, Ser or Thr
  MOD_RES (17)...(17): Xaa = Ala, Asp, Glu, Phe, Gly, Lys, Leu, Asn, Pro, Gln, Arg, Ser or Thr
  MOD_RES (18)...(18): Xaa = Ala, Asp, Glu, Gly, Met, Asn, Arg, Ser, Thr, Val or Tyr
  MOD_RES (19)...(19): Xaa = Ala, Asp, Glu, Gly, Lys, Leu, Met, Gln, Arg, Ser or Thr
  MOD_RES (20)...(20): Xaa = Phe, His, Ile, Pro, Arg, Val, Trp or Tyr
  MOD_RES (21)...(21): Xaa = Ala, Glu, His, Lys, Leu, Gln, Ser, Thr, Val or Tyr
  MOD_RES (23)...(23): Xaa = Ala, Asp, Glu, Phe, Gly, His, Ile, Lys, Leu, Met, Asn, Pro, Gln, Arg, Ser, Thr, Val, Trp or Tyr
  MOD_RES (25)...(25): Xaa = Ala, Asp, Glu, Phe, Gly, His, Ile, Lys, Leu, Asn, Pro, Gln, Arg, Ser, Thr, Val or Tyr
  MOD_RES (26)...(26): Xaa = Ala, Asp, Glu, Phe, His, Ile, Lys, Leu, Met, Asn, Pro, Gln, Arg, Ser, Thr or Val
  MOD_RES (27)...(27): Xaa = Asp, Glu, Gly, Asn, Pro or Ser
  MOD_RES (28)...(28): Xaa = Ala, Asp, Glu, Phe, His, Leu, Met, Gln, Arg, Ser, Thr, Trp or Tyr
  MOD_RES (29)...(29): Xaa = Ala, Asp, Glu, Phe, Gly, His, Ile, Lys, Leu, Met, Asn, Gln, Arg, Ser, Thr, Val or Tyr
  MOD_RES (30)...(30): Xaa = Ala, Phe, Gly, Ile, Lys, Leu, Met, Pro, Gln, Arg, Ser, Thr, Val, Trp or Tyr
  MOD_RES (31)...(31): Xaa = Ala, Asp, Glu, Phe, Gly, His, Lys, Leu, Met, Asn, Pro, Gln, Arg, Ser, Thr, Val or Trp
  MOD_RES (32)...(32): Xaa = Ala, Asp, Glu, Gly, Ile, Lys, Leu, Met, Asn, Pro, Gln, Arg, Ser, Thr, Val or Tyr
  MOD_RES (33)...(33): Xaa = Ala, Asp, Glu, Phe, Gly, His, Ile, Lys, Leu, Met, Asn, Gln, Ser, Thr or Val
  MOD_RES (34)...(34): Xaa = Glu, Phe, Gly, His, Ile, Lys, Leu, Met, Asn, Pro, Gln, Arg, Ser, Thr or Trp
CXXXXCXXXXXCXXXXXXXXXCXCXXXXXXXXXXC

SEQ ID NO: 301 - protein, 36 aa, Artificial Sequence
  EGF domain monomer sequence
  MOD_RES (2)...(2): Xaa = Ala, Asp, Glu, Phe, Gly, His, Ile, Lys, Leu, Asn, Pro, Gln, Arg, Ser, Thr, Val or Trp
  MOD_RES (3)...(3): Xaa = Ala, Asp, Glu, Gly, His, Lys, Leu, Met, Asn, Pro, Arg, Ser, Thr or Tyr
  MOD_RES (4)...(4): Xaa = Ala, Asp, Glu, Gly, His, Lys, Leu, Met, Asn, Pro, Gln, Arg, Ser, Thr, Val or Trp
  MOD_RES (5)...(5): Xaa = Ala, Glu, Gly, Met, Asn, Pro, Gln, Arg, Ser, Thr or Tyr
  MOD_RES (7)...(7): Xaa = Ala, Cys, Asp, Glu, Phe, Gly, His, Lys, Leu, Met, Asn, Pro, Gln, Arg, Ser, Val or Tyr
  MOD_RES (8)...(8): Xaa = Ala, Asp, Glu, Gly, His, Ile, Lys, Leu, Met, Asn, Pro, Gln, Arg, Ser, Thr, Val or Tyr
  MOD_RES (9)...(9): Xaa = Ala, Asp, Glu, Phe, Gly, His, Lys, Leu, Asn, Gln, Arg, Ser, Thr or Tyr
  MOD_RES (10)...(10): Xaa = Ala, Phe, Gly, His, Gln, Ser, Thr or Val
  MOD_RES (11)...(11): Xaa = Ala, Asp, Glu, Phe, His, Ile, Lys, Leu, Met, Asn, Gln, Arg, Ser, Thr or Val
  MOD_RES (13)...(13): Xaa = Ala, Asp, Phe, His, Ile, Lys, Leu, Met, Asn, Gln, Arg, Ser, Thr, Val or Tyr
  MOD_RES (14)...(14): Xaa = Ala, Asp, Glu, Phe, His, Leu, Met, Asn, Pro, Gln, Arg, Ser, Val or Tyr
  MOD_RES (15)...(15): Xaa = Ala, Asp, Glu, Phe, Gly, His, Leu, Asn, Arg, Ser, Thr, Val or Tyr
  MOD_RES (16)...(16): Xaa = Ala, Asp, Glu, Gly, Asn, Pro, Gln, Arg, Ser or Thr
  MOD_RES (17)...(17): Xaa = Ala, Asp, Glu, Phe, Gly, Lys, Leu, Asn, Pro, Gln, Arg, Ser or Thr
  MOD_RES (18)...(18): Xaa = Ala, Asp, Glu, Gly, Met, Asn, Arg, Ser, Thr, Val or Tyr
  MOD_RES (19)...(19): Xaa = Ala, Asp, Glu, Gly, Lys, Leu, Met, Gln, Arg, Ser or Thr
  MOD_RES (20)...(20): Xaa = Phe, His, Ile, Pro, Arg, Val, Trp or Tyr
  MOD_RES (21)...(21): Xaa = Ala, Glu, His, Lys, Leu, Gln, Ser, Thr, Val or Tyr
  MOD_RES (23)...(23): Xaa = Ala, Asp, Glu, Phe, Gly, His, Ile, Lys, Leu, Met, Asn, Pro, Gln, Arg, Ser, Thr, Val, Trp or Tyr
  MOD_RES (25)...(25): Xaa = Ala, Asp, Glu, Phe, Gly, His, Ile, Lys, Leu, Asn, Pro, Gln, Arg, Ser, Thr, Val or Tyr
  MOD_RES (26)...(26): Xaa = Ala, Asp, Glu, Phe, His, Ile, Lys, Leu, Met, Asn, Pro, Gln, Arg, Ser, Thr or Val
  MOD_RES (27)...(27): Xaa = Asp, Glu, Gly, Asn, Pro or Ser
  MOD_RES (28)...(28): Xaa = Ala, Asp, Glu, Phe, His, Leu, Met, Gln, Arg, Ser, Thr, Trp or Tyr
  MOD_RES (29)...(29): Xaa = Ala, Asp, Glu, Phe, Gly, His, Ile, Lys, Leu, Met, Asn, Gln, Arg, Ser, Thr, Val or Tyr
  MOD_RES (30)...(30): Xaa = Ala, Phe, Gly, Ile, Lys, Leu, Met, Pro, Gln, Arg, Ser, Thr, Val, Trp or Tyr
  MOD_RES (31)...(31): Xaa = Ala, Asp, Glu, Phe, Gly, His, Lys, Leu, Met, Asn, Pro, Gln, Arg, Ser, Thr, Val or Trp
  MOD_RES (32)...(32): Xaa = Ala, Asp, Glu, Gly, Ile, Lys, Leu, Met, Asn, Pro, Gln, Arg, Ser, Thr, Val or Tyr
  MOD_RES (33)...(33): Xaa = Ala, Asp, Glu, Phe, Gly, His, Ile, Lys, Leu, Met, Asn, Gln, Ser, Thr or Val
  MOD_RES (34)...(34): Xaa = Glu, Phe, Gly, His, Ile, Lys, Leu, Met, Asn, Pro, Gln, Arg, Ser, Thr or Trp
  MOD_RES (35)...(35): Xaa = Ala, Asp, Glu, Phe, Gly, His, Lys, Leu, Met, Asn, Pro, Gln, Arg, Ser, Thr, Val or Tyr
CXXXXCXXXXXCXXXXXXXXXCXCXXXXXXXXXXXC

SEQ ID NO: 302 - protein, 37 aa, Artificial Sequence
  EGF domain monomer sequence
  MOD_RES (2)...(2): Xaa = Ala, Asp, Glu, Phe, Gly, His, Ile, Lys, Leu, Asn, Pro, Gln, Arg, Ser, Thr, Val or Trp
  MOD_RES (3)...(3): Xaa = Ala, Asp, Glu, Gly, His, Lys, Leu, Met, Asn, Pro, Arg, Ser, Thr or Tyr
  MOD_RES (4)...(4): Xaa = Ala, Asp, Glu, Gly, His, Lys, Leu, Met, Asn, Pro, Gln, Arg, Ser, Thr, Val or Trp
  MOD_RES (5)...(5): Xaa = Ala, Glu, Gly, Met, Asn, Pro, Gln, Arg, Ser, Thr or Tyr
  MOD_RES (7)...(7): Xaa = Ala, Cys, Asp, Glu, Phe, Gly, His, Lys, Leu, Met, Asn, Pro, Gln, Arg, Ser, Val or Tyr
  MOD_RES (8)...(8): Xaa = Ala, Asp, Glu, Gly, His, Ile, Lys, Leu, Met, Asn, Pro, Gln, Arg, Ser, Thr, Val or Tyr
  MOD_RES (9)...(9): Xaa = Ala, Asp, Glu, Phe, Gly, His, Lys, Leu, Asn, Gln, Arg, Ser, Thr or Tyr
  MOD_RES (10)...(10): Xaa = Ala, Phe, Gly, His, Gln, Ser, Thr or Val
  MOD_RES (11)...(11): Xaa = Ala, Asp, Glu, Phe, His, Ile, Lys, Leu, Met, Asn, Gln, Arg, Ser, Thr or Val
  MOD_RES (13)...(13): Xaa = Ala, Asp, Phe, His, Ile, Lys, Leu, Met, Asn, Gln, Arg, Ser, Thr, Val or Tyr
  MOD_RES (14)...(14): Xaa = Ala, Asp, Glu, Phe, His, Leu, Met, Asn, Pro, Gln, Arg, Ser, Val or Tyr
  MOD_RES (15)...(15): Xaa = Ala, Asp, Glu, Phe, Gly, His, Leu, Asn, Arg, Ser, Thr, Val or Tyr
  MOD_RES (16)...(16): Xaa = Ala, Asp, Glu, Gly, Asn, Pro, Gln, Arg, Ser or Thr
  MOD_RES (17)...(17): Xaa = Ala, Asp, Glu, Phe, Gly, Lys, Leu, Asn, Pro, Gln, Arg, Ser or Thr
  MOD_RES (18)...(18): Xaa = Ala, Asp, Glu, Gly, Met, Asn, Arg, Ser, Thr, Val or Tyr
  MOD_RES (19)...(19): Xaa = Ala, Asp, Glu, Gly, Lys, Leu, Met, Gln, Arg, Ser or Thr
  MOD_RES (20)...(20): Xaa = Phe, His, Ile, Pro, Arg, Val, Trp or Tyr
  MOD_RES (21)...(21): Xaa = Ala, Glu, His, Lys, Leu, Gln, Ser, Thr, Val or Tyr
  MOD_RES (23)...(23): Xaa = Ala, Asp, Glu, Phe, Gly, His, Ile, Lys, Leu, Met, Asn, Pro, Gln, Arg, Ser, Thr, Val, Trp or Tyr
  MOD_RES (25)...(25): Xaa = Ala, Asp, Glu, Phe, Gly, His, Ile, Lys, Leu, Asn, Pro, Gln, Arg, Ser, Thr, Val or Tyr
  MOD_RES (26)...(26): Xaa = Ala, Asp, Glu, Phe, His, Ile, Lys, Leu, Met, Asn, Pro, Gln, Arg, Ser, Thr or Val
  MOD_RES (27)...(27): Xaa = Asp, Glu, Gly, Asn, Pro or Ser
  MOD_RES (28)...(28): Xaa = Ala, Asp, Glu, Phe, His, Leu, Met, Gln, Arg, Ser, Thr, Trp or Tyr
  MOD_RES (29)...(29): Xaa = Ala, Asp, Glu, Phe, Gly, His, Ile, Lys, Leu, Met, Asn, Gln, Arg, Ser, Thr, Val or Tyr
  MOD_RES (30)...(30): Xaa = Ala, Phe, Gly, Ile, Lys, Leu, Met, Pro, Gln, Arg, Ser, Thr, Val, Trp or Tyr
  MOD_RES (31)...(31): Xaa = Ala, Asp, Glu, Phe, Gly, His, Lys, Leu, Met, Asn, Pro, Gln, Arg, Ser, Thr, Val or Trp
  MOD_RES (32)...(32): Xaa = Ala, Asp, Glu, Gly, Ile, Lys, Leu, Met, Asn, Pro, Gln, Arg, Ser, Thr, Val or Tyr
  MOD_RES (33)...(33): Xaa = Ala, Asp, Glu, Phe, Gly, His, Ile, Lys, Leu, Met, Asn, Gln, Ser, Thr or Val
  MOD_RES (34)...(34): Xaa = Glu, Phe, Gly, His, Ile, Lys, Leu, Met, Asn, Pro, Gln, Arg, Ser, Thr or Trp
  MOD_RES (35)...(35): Xaa = Ala, Asp, Glu, Phe, Gly, His, Lys, Leu, Met, Asn, Pro, Gln, Arg, Ser, Thr, Val or Tyr
  MOD_RES (36)...(36): Xaa = Ala, Asp, Glu, Phe, Gly, His, Ile, Lys, Met, Asn, Gln, Arg, Ser, Thr, Val or Tyr
CXXXXCXXXXXCXXXXXXXXXCXCXXXXXXXXXXXXC

SEQ ID NO: 303 - protein, 33 aa, Artificial Sequence
  EGF domain monomer sequence
  MOD_RES (2)...(2): Xaa = Ala, Asp, Glu, Gly, Ile, Lys, Leu, Gln, Arg, Ser, Thr or Val
  MOD_RES (3)...(3): Xaa = Ala, Asp, Glu, Phe, Gly, His, Ile, Lys, Leu, Met, Asn, Pro, Gln, Arg, Ser, Thr or Val
  MOD_RES (4)...(4): Xaa = Ala, Glu, Phe, Gly, His, Leu, Asn, Pro, Gln, Arg, Ser, Thr, Trp or Tyr
  MOD_RES (5)...(5): Xaa = Ala, Asp, Glu, Phe, Gly, His, Ile, Lys, Leu, Asn, Pro, Arg, Ser or Thr
  MOD_RES (6)...(6): Xaa = Ala, Phe, Gly, Ile, Lys, Leu, Met, Asn, Pro, Gln, Arg, Ser, Thr, Val or Tyr
  MOD_RES (8)...(8): Xaa = Ala, Asp, Glu, Phe, Gly, His, Ile, Lys, Leu, Met, Asn, Pro, Gln, Arg, Ser, Thr or Val
  MOD_RES (9)...(9): Xaa = Ala, Asp, Glu, Phe, Gly, His, Lys, Leu, Asn, Pro, Gln, Arg, Ser, Thr or Tyr
  MOD_RES (10)...(10): Xaa = Ala, Gly or Thr
  MOD_RES (11)...(11): Xaa = Ala, Asp, Glu, Phe, His, Ile, Lys, Leu, Met, Asn, Gln, Arg, Ser, Thr or Val
  MOD_RES (13)...(13): Xaa = Ala, Asp, Phe, His, Ile, Lys, Leu, Met, Asn, Gln, Arg, Ser, Thr, Val or Tyr
  MOD_RES (14)...(14): Xaa = Ala, Asp, Glu, Phe, His, Leu, Met, Asn, Pro, Gln, Arg, Ser, Val or Tyr
  MOD_RES (15)...(15): Xaa = Ala, Asp, Glu, Phe, Gly, His, Leu, Asn, Arg, Ser, Thr, Val or Tyr
  MOD_RES (16)...(16): Xaa = Ala, Asp, Glu, Gly, Asn, Pro, Gln, Arg, Ser or Thr
  MOD_RES (17)...(17): Xaa = Ala, Asp, Glu, Phe, Gly, Lys, Leu, Asn, Pro, Gln, Arg, Ser or Thr
  MOD_RES (18)...(18): Xaa = Ala, Asp, Glu, Gly, Met, Asn, Arg, Ser, Thr, Val or Tyr
  MOD_RES (19)...(19): Xaa = Ala, Asp, Glu, Gly, Lys, Leu, Met, Gln, Arg, Ser or Thr
  MOD_RES (20)...(20): Xaa = Phe, His, Ile, Pro, Arg, Val, Trp or Tyr
  MOD_RES (21)...(21): Xaa = Ala, Glu, His, Lys, Leu, Gln, Ser, Thr, Val or Tyr
  MOD_RES (23)...(23): Xaa = Ala, Asp, Glu, Phe, Gly, His, Ile, Lys, Leu, Met, Asn, Pro, Gln, Arg, Ser, Thr, Val, Trp or Tyr
  MOD_RES (25)...(25): Xaa = Ala, Asp, Glu, Phe, His, Lys, Leu, Met, Asn, Pro, Gln, Arg, Ser, Thr, Val, Trp or Tyr
  MOD_RES (26)...(26): Xaa = Ala, Asp, Glu, Phe, Gly, His, Lys, Leu, Asn, Pro, Gln, Arg, Ser, Thr, Val or Tyr
  MOD_RES (27)...(27): Xaa = Ala, Glu, Gly, His, Lys, Leu, Asn, Pro, Arg, Ser, Thr or Tyr
  MOD_RES (28)...(28): Xaa = Phe, His, Ile, Leu, Met, Arg, Thr, Trp or Tyr
  MOD_RES (29)...(29): Xaa = Ala, Asp, Glu, Phe, Gly, His, Ile, Lys, Leu, Met, Asn, Gln, Arg, Ser, Thr, Val or Tyr
  MOD_RES (30)...(30): Xaa = Asp, Gly or Ser
  MOD_RES (31)...(31): Xaa = Ala, Asp, Glu, Phe, His, Ile, Lys, Leu, Asn, Pro, Gln, Arg, Ser, Thr, Val or Tyr
  MOD_RES (32)...(32): Xaa = Ala, Asp, Glu, Phe, His, Ile, Lys, Leu, Met, Asn, Gln, Arg, Ser, Thr or Tyr
CXXXXXCXXXXCXXXXXXXXXCXCXXXXXXXXC

SEQ ID NO: 304 - protein, 34 aa, Artificial Sequence
  EGF domain monomer sequence
  MOD_RES (2)...(2): Xaa = Ala, Asp, Glu, Gly, Ile, Lys, Leu, Gln, Arg, Ser, Thr or Val
  MOD_RES (3)...(3): Xaa = Ala, Asp, Glu, Phe, Gly, His, Ile, Lys, Leu, Met, Asn, Pro, Gln, Arg, Ser, Thr or Val
  MOD_RES (4)...(4): Xaa = Ala, Glu, Phe, Gly, His, Leu, Asn, Pro, Gln, Arg, Ser, Thr, Trp or Tyr
  MOD_RES (5)...(5): Xaa = Ala, Asp, Glu, Phe, Gly, His, Ile, Lys, Leu, Asn, Pro, Arg, Ser or Thr
  MOD_RES (6)...(6): Xaa = Ala, Phe, Gly, Ile, Lys, Leu, Met, Asn, Pro, Gln, Arg, Ser, Thr, Val or Tyr
  MOD_RES (8)...(8): Xaa = Ala, Asp, Glu, Phe, Gly, His, Ile, Lys, Leu, Met, Asn, Pro, Gln, Arg, Ser, Thr or Val
  MOD_RES (9)...(9): Xaa = Ala, Asp, Glu, Phe, Gly, His, Lys, Leu, Asn, Pro, Gln, Arg, Ser, Thr or Tyr
  MOD_RES (10)...(10): Xaa = Ala, Gly or Thr
  MOD_RES (11)...(11): Xaa = Ala, Asp, Glu, Phe, His, Ile, Lys, Leu, Met, Asn, Gln, Arg, Ser, Thr or Val
  MOD_RES (13)...(13): Xaa = Ala, Asp, Phe, His, Ile, Lys, Leu, Met, Asn, Gln, Arg, Ser, Thr, Val or Tyr
  MOD_RES (14)...(14): Xaa = Ala, Asp, Glu, Phe, His, Leu, Met, Asn, Pro, Gln, Arg, Ser, Val or Tyr
  MOD_RES (15)...(15): Xaa = Ala, Asp, Glu, Phe, Gly, His, Leu, Asn, Arg, Ser, Thr, Val or Tyr
  MOD_RES (16)...(16): Xaa = Ala, Asp, Glu, Gly, Asn, Pro, Gln, Arg, Ser or Thr
  MOD_RES (17)...(17): Xaa = Ala, Asp, Glu, Phe, Gly, Lys, Leu, Asn, Pro, Gln, Arg, Ser or Thr
  MOD_RES (18)...(18): Xaa = Ala, Asp, Glu, Gly, Met, Asn, Arg, Ser, Thr, Val or Tyr
  MOD_RES (19)...(19): Xaa = Ala, Asp, Glu, Gly, Lys, Leu, Met, Gln, Arg, Ser or Thr
  MOD_RES (20)...(20): Xaa = Phe, His, Ile, Pro, Arg, Val, Trp or Tyr
  MOD_RES (21)...(21): Xaa = Ala, Glu, His, Lys, Leu, Gln, Ser, Thr, Val or Tyr
  MOD_RES (23)...(23): Xaa = Ala, Asp, Glu, Phe, Gly, His, Ile, Lys, Leu, Met, Asn, Pro, Gln, Arg, Ser, Thr, Val, Trp or Tyr
  MOD_RES (25)...(25): Xaa = Ala, Asp, Glu, Phe, Gly, His, Ile, Lys, Leu, Asn, Pro, Gln, Arg, Ser, Thr, Val or Tyr
  MOD_RES (26)...(26): Xaa = Ala, Asp, Glu, Phe, His, Ile, Lys, Leu, Met, Asn, Pro, Gln, Arg, Ser, Thr or Val
  MOD_RES (27)...(27): Xaa = Asp, Glu, Gly, Asn, Pro or Ser
  MOD_RES (28)...(28): Xaa = Ala, Asp, Glu, Phe, His, Leu, Met, Gln, Arg, Ser, Thr, Trp or Tyr
  MOD_RES (29)...(29): Xaa = Ala, Asp, Glu, Phe, Gly, His, Ile, Lys, Leu, Met, Asn, Gln, Arg, Ser, Thr, Val or Tyr
  MOD_RES (30)...(30): Xaa = Ala, Phe, Gly, Ile, Lys, Leu, Met, Pro, Gln, Arg, Ser, Thr, Val, Trp or Tyr
  MOD_RES (31)...(31): Xaa = Ala, Asp, Glu, Phe, Gly, His, Lys, Leu, Met, Asn, Pro, Gln, Arg, Ser, Thr, Val or Trp
  MOD_RES (32)...(32): Xaa = Ala, Asp, Glu, Gly, Ile, Lys, Leu, Met, Asn, Pro, Gln, Arg, Ser, Thr, Val or Tyr
  MOD_RES (33)...(33): Xaa = Ala, Asp, Glu, Phe, Gly, His, Ile, Lys, Leu, Met, Asn, Gln, Ser, Thr or Val
CXXXXXCXXXXCXXXXXXXXXCXCXXXXXXXXXC

SEQ ID NO: 305 - protein, 35 aa, Artificial Sequence
  EGF domain monomer sequence
  MOD_RES (2)...(2): Xaa = Ala, Asp, Glu, Gly, Ile, Lys, Leu, Gln, Arg, Ser, Thr or Val
  MOD_RES (3)...(3): Xaa = Ala, Asp, Glu, Phe, Gly, His, Ile, Lys, Leu, Met, Asn, Pro, Gln, Arg, Ser, Thr or Val
  MOD_RES (4)...(4): Xaa = Ala, Glu, Phe, Gly, His, Leu, Asn, Pro, Gln, Arg, Ser, Thr, Trp or Tyr
  MOD_RES (5)...(5): Xaa = Ala, Asp, Glu, Phe, Gly, His, Ile, Lys, Leu, Asn, Pro, Arg, Ser or Thr
  MOD_RES (6)...(6): Xaa = Ala, Phe, Gly, Ile, Lys, Leu, Met, Asn, Pro, Gln, Arg, Ser, Thr, Val or Tyr
  MOD_RES (8)...(8): Xaa = Ala, Asp, Glu, Phe, Gly, His, Ile, Lys, Leu, Met, Asn, Pro, Gln, Arg, Ser, Thr or Val
  MOD_RES (9)...(9): Xaa = Ala, Asp, Glu, Phe, Gly, His, Lys, Leu, Asn, Pro, Gln, Arg, Ser, Thr or Tyr
  MOD_RES (10)...(10): Xaa = Ala, Gly or Thr
  MOD_RES (11)...(11): Xaa = Ala, Asp, Glu, Phe, His, Ile, Lys, Leu, Met, Asn, Gln, Arg, Ser, Thr or Val
  MOD_RES (13)...(13): Xaa = Ala, Asp, Phe, His, Ile, Lys, Leu, Met, Asn, Gln, Arg, Ser, Thr, Val or Tyr
  MOD_RES (14)...(14): Xaa = Ala, Asp, Glu, Phe, His, Leu, Met, Asn, Pro, Gln, Arg, Ser, Val or Tyr
  MOD_RES (15)...(15): Xaa = Ala, Asp, Glu, Phe, Gly, His, Leu, Asn, Arg, Ser, Thr, Val or Tyr
  MOD_RES (16)...(16): Xaa = Ala, Asp, Glu, Gly, Asn, Pro, Gln, Arg, Ser or Thr
  MOD_RES (17)...(17): Xaa = Ala, Asp, Glu, Phe, Gly, Lys, Leu, Asn, Pro, Gln, Arg, Ser or Thr
  MOD_RES (18)...(18): Xaa = Ala, Asp, Glu, Gly, Met, Asn, Arg, Ser, Thr, Val or Tyr
  MOD_RES (19)...(19): Xaa = Ala, Asp, Glu, Gly, Lys, Leu, Met, Gln, Arg, Ser or Thr
  MOD_RES (20)...(20): Xaa = Phe, His, Ile, Pro, Arg, Val, Trp or Tyr
  MOD_RES (21)...(21): Xaa = Ala, Glu, His, Lys, Leu, Gln, Ser, Thr, Val or Tyr
  MOD_RES (23)...(23): Xaa = Ala, Asp, Glu, Phe, Gly, His, Ile, Lys, Leu, Met, Asn, Pro, Gln, Arg, Ser, Thr, Val, Trp or Tyr
  MOD_RES (25)...(25): Xaa = Ala, Asp, Glu, Phe, Gly, His, Ile, Lys, Leu, Asn, Pro, Gln, Arg, Ser, Thr, Val or Tyr
  MOD_RES (26)...(26): Xaa = Ala, Asp, Glu, Phe, His, Ile, Lys, Leu, Met, Asn, Pro, Gln, Arg, Ser, Thr or Val
  MOD_RES (27)...(27): Xaa = Asp, Glu, Gly, Asn, Pro or Ser
  MOD_RES (28)...(28): Xaa = Ala, Asp, Glu, Phe, His, Leu, Met, Gln, Arg, Ser, Thr, Trp or Tyr
  MOD_RES (29)...(29): Xaa = Ala, Asp, Glu, Phe, Gly, His, Ile, Lys, Leu, Met, Asn, Gln, Arg, Ser, Thr, Val or Tyr
  MOD_RES (30)...(30): Xaa = Ala, Phe, Gly, Ile, Lys, Leu, Met, Pro, Gln, Arg, Ser, Thr, Val, Trp or Tyr
  MOD_RES (31)...(31): Xaa = Ala, Asp, Glu, Phe, Gly, His, Lys, Leu, Met, Asn, Pro, Gln, Arg, Ser, Thr, Val or Trp
  MOD_RES (32)...(32): Xaa = Ala, Asp, Glu, Gly, Ile, Lys, Leu, Met, Asn, Pro, Gln, Arg, Ser, Thr, Val or Tyr
  MOD_RES (33)...(33): Xaa = Ala, Asp, Glu, Phe, Gly, His, Ile, Lys, Leu, Met, Asn, Gln, Ser, Thr or Val
  MOD_RES (34)...(34): Xaa = Glu, Phe, Gly, His, Ile, Lys, Leu, Met, Asn, Pro, Gln, Arg, Ser, Thr or Trp
CXXXXXCXXXXCXXXXXXXXXCXCXXXXXXXXXXC

SEQ ID NO: 306 - protein, 36 aa, Artificial Sequence
  EGF domain monomer sequence
  MOD_RES (2)...(2): Xaa = Ala, Asp, Glu, Gly, Ile, Lys, Leu, Gln, Arg, Ser, Thr or Val
  MOD_RES (3)...(3): Xaa = Ala, Asp, Glu, Phe, Gly, His, Ile, Lys, Leu, Met, Asn, Pro, Gln, Arg, Ser, Thr or Val
  MOD_RES (4)...(4): Xaa = Ala, Glu, Phe, Gly, His, Leu, Asn, Pro, Gln, Arg, Ser, Thr, Trp or Tyr
  MOD_RES (5)...(5): Xaa = Ala, Asp, Glu, Phe, Gly, His, Ile, Lys, Leu, Asn, Pro, Arg, Ser or Thr
  MOD_RES (6)...(6): Xaa = Ala, Phe, Gly, Ile, Lys, Leu, Met, Asn, Pro, Gln, Arg, Ser, Thr, Val or Tyr
  MOD_RES (8)...(8): Xaa = Ala, Asp, Glu, Phe, Gly, His, Ile, Lys, Leu, Met, Asn, Pro, Gln, Arg, Ser, Thr or Val
  MOD_RES (9)...(9): Xaa = Ala, Asp, Glu, Phe, Gly, His, Lys, Leu, Asn, Pro, Gln, Arg, Ser, Thr or Tyr
  MOD_RES (10)...(10): Xaa = Ala, Gly or Thr
  MOD_RES (11)...(11): Xaa = Ala, Asp, Glu, Phe, His, Ile, Lys, Leu, Met, Asn, Gln, Arg, Ser, Thr or Val
  MOD_RES (13)...(13): Xaa = Ala, Asp, Phe, His, Ile, Lys, Leu, Met, Asn, Gln, Arg, Ser, Thr, Val or Tyr
  MOD_RES (14)...(14): Xaa = Ala, Asp, Glu, Phe, His, Leu, Met, Asn, Pro, Gln, Arg, Ser, Val or Tyr
  MOD_RES (15)...(15): Xaa = Ala, Asp, Glu, Phe, Gly, His, Leu, Asn, Arg, Ser, Thr, Val or Tyr
  MOD_RES (16)...(16): Xaa = Ala, Asp, Glu, Gly, Asn, Pro, Gln, Arg, Ser or Thr
  MOD_RES (17)...(17): Xaa = Ala, Asp, Glu, Phe, Gly, Lys, Leu, Asn, Pro, Gln, Arg, Ser or Thr
  MOD_RES (18)...(18): Xaa = Ala, Asp, Glu, Gly, Met, Asn, Arg, Ser, Thr, Val or Tyr
  MOD_RES (19)...(19): Xaa = Ala, Asp, Glu, Gly, Lys, Leu, Met, Gln, Arg, Ser or Thr
  MOD_RES (20)...(20): Xaa = Phe, His, Ile, Pro, Arg, Val, Trp or Tyr
  MOD_RES (21)...(21): Xaa = Ala, Glu, His, Lys, Leu, Gln, Ser, Thr, Val or Tyr
  MOD_RES (23)...(23): Xaa = Ala, Asp, Glu, Phe, Gly, His, Ile, Lys, Leu, Met, Asn, Pro, Gln, Arg, Ser, Thr, Val, Trp or Tyr
  MOD_RES (25)...(25): Xaa = Ala, Asp, Glu, Phe, Gly, His, Ile, Lys, Leu, Asn, Pro, Gln, Arg, Ser, Thr, Val or Tyr
  MOD_RES (26)...(26): Xaa = Ala, Asp, Glu, Phe, His, Ile, Lys, Leu, Met, Asn, Pro, Gln, Arg, Ser, Thr or Val
  MOD_RES (27)...(27): Xaa = Asp, Glu, Gly, Asn, Pro or Ser
  MOD_RES (28)...(28): Xaa = Ala, Asp, Glu, Phe, His, Leu, Met, Gln, Arg, Ser, Thr, Trp or Tyr
  MOD_RES (29)...(29): Xaa = Ala, Asp, Glu, Phe, Gly, His, Ile, Lys, Leu, Met, Asn, Gln, Arg, Ser, Thr, Val or Tyr
  MOD_RES (30)...(30): Xaa = Ala, Phe, Gly, Ile, Lys, Leu, Met, Pro, Gln, Arg, Ser, Thr, Val, Trp or Tyr
  MOD_RES (31)...(31): Xaa = Ala, Asp, Glu, Phe, Gly, His, Lys, Leu, Met, Asn, Pro, Gln, Arg, Ser, Thr, Val or Trp
  MOD_RES (32)...(32): Xaa = Ala, Asp, Glu, Gly, Ile, Lys, Leu, Met, Asn, Pro, Gln, Arg, Ser, Thr, Val or Tyr
  MOD_RES (33)...(33): Xaa = Ala, Asp, Glu, Phe, Gly, His, Ile, Lys, Leu, Met, Asn, Gln, Ser, Thr or Val
  MOD_RES (34)...(34): Xaa = Glu, Phe, Gly, His, Ile, Lys, Leu, Met, Asn, Pro, Gln, Arg, Ser, Thr or Trp
  MOD_RES (35)...(35): Xaa = Ala, Asp, Glu, Phe, Gly, His, Lys, Leu, Met, Asn, Pro, Gln, Arg, Ser, Thr, Val or Tyr
CXXXXXCXXXXCXXXXXXXXXCXCXXXXXXXXXXXC

SEQ ID NO: 307 - protein, 37 aa, Artificial Sequence
  EGF domain monomer sequence
  MOD_RES (2)...(2): Xaa = Ala, Asp, Glu, Gly, Ile, Lys, Leu, Gln, Arg, Ser, Thr or Val
  MOD_RES (3)...(3): Xaa = Ala, Asp, Glu, Phe, Gly, His, Ile, Lys, Leu, Met, Asn, Pro, Gln, Arg, Ser, Thr or Val
  MOD_RES (4)...(4): Xaa = Ala, Glu, Phe, Gly, His, Leu, Asn, Pro, Gln, Arg, Ser, Thr, Trp or Tyr
  MOD_RES (5)...(5): Xaa = Ala, Asp, Glu, Phe, Gly, His, Ile, Lys, Leu, Asn, Pro, Arg, Ser or Thr
  MOD_RES (6)...(6): Xaa = Ala, Phe, Gly, Ile, Lys, Leu, Met, Asn, Pro, Gln, Arg, Ser, Thr, Val or Tyr
  MOD_RES (8)...(8): Xaa = Ala, Asp, Glu, Phe, Gly, His, Ile, Lys, Leu, Met, Asn, Pro, Gln, Arg, Ser, Thr or Val
  MOD_RES (9)...(9): Xaa = Ala, Asp, Glu, Phe, Gly, His, Lys, Leu, Asn, Pro, Gln, Arg, Ser, Thr or Tyr
  MOD_RES (10)...(10): Xaa = Ala, Gly or Thr
  MOD_RES (11)...(11): Xaa = Ala, Asp, Glu, Phe, His, Ile, Lys, Leu, Met, Asn, Gln, Arg, Ser, Thr or Val
  MOD_RES (13)...(13): Xaa = Ala, Asp, Phe, His, Ile, Lys, Leu, Met, Asn, Gln, Arg, Ser, Thr, Val or Tyr
  MOD_RES (14)...(14): Xaa = Ala, Asp, Glu, Phe, His, Leu, Met, Asn, Pro, Gln, Arg, Ser, Val or Tyr
  MOD_RES (15)...(15): Xaa = Ala, Asp, Glu, Phe, Gly, His, Leu, Asn, Arg, Ser, Thr, Val or Tyr
  MOD_RES (16)...(16): Xaa = Ala, Asp, Glu, Gly, Asn, Pro, Gln, Arg, Ser or Thr
  MOD_RES (17)...(17): Xaa = Ala, Asp, Glu, Phe, Gly, Lys, Leu, Asn, Pro, Gln, Arg, Ser or Thr
  MOD_RES (18)...(18): Xaa = Ala, Asp, Glu, Gly, Met, Asn, Arg, Ser, Thr, Val or Tyr
  MOD_RES (19)...(19): Xaa = Ala, Asp, Glu, Gly, Lys, Leu, Met, Gln, Arg, Ser or Thr
  MOD_RES (20)...(20): Xaa = Phe, His, Ile, Pro, Arg, Val, Trp or Tyr
  MOD_RES (21)...(21): Xaa = Ala, Glu, His, Lys, Leu, Gln, Ser, Thr, Val or Tyr
  MOD_RES (23)...(23): Xaa = Ala, Asp, Glu, Phe, Gly, His, Ile, Lys, Leu, Met, Asn, Pro, Gln, Arg, Ser, Thr, Val, Trp or Tyr
  MOD_RES (25)...(25): Xaa = Ala, Asp, Glu, Phe, Gly, His, Ile, Lys, Leu, Asn, Pro, Gln, Arg, Ser, Thr, Val or Tyr
  MOD_RES (26)...(26): Xaa = Ala, Asp, Glu, Phe, His, Ile, Lys, Leu, Met, Asn, Pro, Gln, Arg, Ser, Thr or Val
  MOD_RES (27)...(27): Xaa = Asp, Glu, Gly, Asn, Pro or Ser
  MOD_RES (28)...(28): Xaa = Ala, Asp, Glu, Phe, His, Leu, Met, Gln, Arg, Ser, Thr, Trp or Tyr
  MOD_RES (29)...(29): Xaa = Ala, Asp, Glu, Phe, Gly, His, Ile, Lys, Leu, Met, Asn, Gln, Arg, Ser, Thr, Val or Tyr
  MOD_RES (30)...(30): Xaa = Ala, Phe, Gly, Ile, Lys, Leu, Met, Pro, Gln, Arg, Ser, Thr, Val, Trp or Tyr
  MOD_RES (31)...(31): Xaa = Ala, Asp, Glu, Phe, Gly, His, Lys, Leu, Met, Asn, Pro, Gln, Arg, Ser, Thr, Val or Trp
  MOD_RES (32)...(32): Xaa = Ala, Asp, Glu, Gly, Ile, Lys, Leu, Met, Asn, Pro, Gln, Arg, Ser, Thr, Val or Tyr
  MOD_RES (33)...(33): Xaa = Ala, Asp, Glu, Phe, Gly, His, Ile, Lys, Leu, Met, Asn, Gln, Ser, Thr or Val
  MOD_RES (34)...(34): Xaa = Glu, Phe, Gly, His, Ile, Lys, Leu, Met, Asn, Pro, Gln, Arg, Ser, Thr or Trp
  MOD_RES (35)...(35): Xaa = Ala, Asp, Glu, Phe, Gly, His, Lys, Leu, Met, Asn, Pro, Gln, Arg, Ser, Thr, Val or Tyr
  MOD_RES (36)...(36): Xaa = Ala, Asp, Glu, Phe, Gly, His, Ile, Lys, Met, Asn, Gln, Arg, Ser, Thr, Val or Tyr
CXXXXXCXXXXCXXXXXXXXXCXCXXXXXXXXXXXXC

SEQ ID NO: 308 - protein, 34 aa, Artificial Sequence
  EGF domain monomer sequence
  MOD_RES (2)...(2): Xaa = Ala, Asp, Glu, Phe, Gly, Ile, Lys, Leu, Met, Asn, Pro, Gln, Arg, Ser, Thr, Val or Tyr
  MOD_RES (3)...(3): Xaa = Ala, Asp, Glu, Phe, Gly, His, Ile, Lys, Leu, Met, Asn, Pro, Gln, Arg, Ser, Thr, Val or Tyr
  MOD_RES (4)...(4): Xaa = Ala, Asp, Glu, Phe, Gly, His, Ile, Lys, Leu, Met, Asn, Pro, Gln, Arg, Ser, Thr, Val or Trp
  MOD_RES (5)...(5): Xaa = Ala, Asp, Glu, Phe, Gly, His, Ile, Lys, Leu, Met, Asn, Pro, Gln, Arg, Ser, Thr or Val
  MOD_RES (6)...(6): Xaa = Ala, Asp, Glu, Phe, Gly, His, Ile, Lys, Leu, Asn, Pro, Gln, Arg, Ser, Val or Tyr
  MOD_RES (7)...(7): Xaa = Ala, Asp, Glu, Gly, Ile, Lys, Leu, Met, Asn, Pro, Gln, Arg, Ser, Thr, Val or Tyr
  MOD_RES (9)...(9): Xaa = Ala, Asp, Glu, Phe, Gly, His, Ile, Lys, Leu, Met, Asn, Pro, Gln, Arg, Ser, Thr or Val
  MOD_RES (10)...(10): Xaa = Ala, Asp, Glu, Phe, Gly, His, Lys, Leu, Asn, Pro, Gln, Arg, Ser, Thr or Tyr
  MOD_RES (11)...(11): Xaa = Ala, Gly or Thr
  MOD_RES (12)...(12): Xaa = Ala, Asp, Glu, Phe, His, Ile, Lys, Leu, Met, Asn, Gln, Arg, Ser, Thr or Val
  MOD_RES (14)...(14): Xaa = Ala, Asp, Phe, His, Ile, Lys, Leu, Met, Asn, Gln, Arg, Ser, Thr, Val or Tyr
  MOD_RES (15)...(15): Xaa = Ala, Asp, Glu, Phe, His, Leu, Met, Asn, Pro, Gln, Arg, Ser, Val or Tyr
  MOD_RES (16)...(16): Xaa = Ala, Asp, Glu, Phe, Gly, His, Leu, Asn, Arg, Ser, Thr, Val or Tyr
  MOD_RES (17)...(17): Xaa = Ala, Asp, Glu, Gly, Asn, Pro, Gln, Arg, Ser or Thr
  MOD_RES (18)...(18): Xaa = Ala, Asp, Glu, Phe, Gly, Lys, Leu, Asn, Pro, Gln, Arg, Ser or Thr
  MOD_RES (19)...(19): Xaa = Ala, Asp, Glu, Gly, Met, Asn, Arg, Ser, Thr, Val or Tyr
  MOD_RES (20)...(20): Xaa = Ala, Asp, Glu, Gly, Lys, Leu, Met, Gln, Arg, Ser or Thr
  MOD_RES (21)...(21): Xaa = Phe, His, Ile, Pro, Arg, Val, Trp or Tyr
  MOD_RES (22)...(22): Xaa = Ala, Glu, His, Lys, Leu, Gln, Ser, Thr, Val or Tyr
  MOD_RES (24)...(24): Xaa = Ala, Asp, Glu, Phe, Gly, His, Ile, Lys, Leu, Met, Asn, Pro, Gln, Arg, Ser, Thr, Val, Trp or Tyr
  MOD_RES (26)...(26): Xaa = Ala, Asp, Glu, Phe, His, Lys, Leu, Met, Asn, Pro, Gln, Arg, Ser, Thr, Val, Trp or Tyr
  MOD_RES (27)...(27): Xaa = Ala, Asp, Glu, Phe, Gly, His, Lys, Leu, Asn, Pro, Gln, Arg, Ser, Thr, Val or Tyr
  MOD_RES (28)...(28): Xaa = Ala, Glu, Gly, His, Lys, Leu, Asn, Pro, Arg, Ser, Thr or Tyr
  MOD_RES (29)...(29): Xaa = Phe, His, Ile, Leu, Met, Arg, Thr, Trp or Tyr
  MOD_RES (30)...(30): Xaa = Ala, Asp, Glu, Phe, Gly, His, Ile, Lys, Leu, Met, Asn, Gln, Arg, Ser, Thr, Val or Tyr
  MOD_RES (31)...(31): Xaa = Asp, Gly or Ser
  MOD_RES (32)...(32): Xaa = Ala, Asp, Glu, Phe, His, Ile, Lys, Leu, Asn, Pro, Gln, Arg, Ser, Thr, Val or Tyr
  MOD_RES (33)...(33): Xaa = Ala, Asp, Glu, Phe, His, Ile, Lys, Leu, Met, Asn, Gln, Arg, Ser, Thr or Tyr
CXXXXXXCXXXXCXXXXXXXXXCXCXXXXXXXXC

SEQ ID NO: 309 - protein, 35 aa, Artificial Sequence
  EGF domain monomer sequence
  MOD_RES (2)...(2): Xaa = Ala, Asp, Glu, Phe, Gly, Ile, Lys, Leu, Met, Asn, Pro, Gln, Arg, Ser, Thr, Val or Tyr
  MOD_RES (3)...(3): Xaa = Ala, Asp, Glu, Phe, Gly, His, Ile, Lys, Leu, Met, Asn, Pro, Gln, Arg, Ser, Thr, Val or Tyr
  MOD_RES (4)...(4): Xaa = Ala, Asp, Glu, Phe, Gly, His, Ile, Lys, Leu, Met, Asn, Pro, Gln, Arg, Ser, Thr, Val or Trp
  MOD_RES (5)...(5): Xaa = Ala, Asp, Glu, Phe, Gly, His, Ile, Lys, Leu, Met, Asn, Pro, Gln, Arg, Ser, Thr or Val
  MOD_RES (6)...(6): Xaa = Ala, Asp, Glu, Phe, Gly, His, Ile, Lys, Leu, Asn, Pro, Gln, Arg, Ser, Val or Tyr
  MOD_RES (7)...(7): Xaa = Ala, Asp, Glu, Gly, Ile, Lys, Leu, Met, Asn, Pro, Gln, Arg, Ser, Thr, Val or Tyr
  MOD_RES (9)...(9): Xaa = Ala, Asp, Glu, Phe, Gly, His, Ile, Lys, Leu, Met, Asn, Pro, Gln, Arg, Ser, Thr or Val
  MOD_RES (10)...(10): Xaa = Ala, Asp, Glu, Phe, Gly, His, Lys, Leu, Asn, Pro, Gln, Arg, Ser, Thr or Tyr
  MOD_RES (11)...(11): Xaa = Ala, Gly or Thr
  MOD_RES (12)...(12): Xaa = Ala, Asp, Glu, Phe, His, Ile, Lys, Leu, Met, Asn, Gln, Arg, Ser, Thr or Val
  MOD_RES (14)...(14): Xaa = Ala, Asp, Phe, His, Ile, Lys, Leu, Met, Asn, Gln, Arg, Ser, Thr, Val or Tyr
  MOD_RES (15)...(15): Xaa = Ala, Asp, Glu, Phe, His, Leu, Met, Asn, Pro, Gln, Arg, Ser, Val or Tyr
  MOD_RES (16)...(16): Xaa = Ala, Asp, Glu, Phe, Gly, His, Leu, Asn, Arg, Ser, Thr, Val or Tyr
  MOD_RES (17)...(17): Xaa = Ala, Asp, Glu, Gly, Asn, Pro, Gln, Arg, Ser or Thr
  MOD_RES (18)...(18): Xaa = Ala, Asp, Glu, Phe, Gly, Lys, Leu, Asn, Pro, Gln, Arg, Ser or Thr
  MOD_RES (19)...(19): Xaa = Ala, Asp, Glu, Gly, Met, Asn, Arg, Ser, Thr, Val or Tyr
  MOD_RES (20)...(20): Xaa = Ala, Asp, Glu, Gly, Lys, Leu, Met, Gln, Arg, Ser or Thr
  MOD_RES (21)...(21): Xaa = Phe, His, Ile, Pro, Arg, Val, Trp or Tyr
  MOD_RES (22)...(22): Xaa = Ala, Glu, His, Lys, Leu, Gln, Ser, Thr, Val or Tyr
  MOD_RES (24)...(24): Xaa = Ala, Asp, Glu, Phe, Gly, His, Ile, Lys, Leu, Met, Asn, Pro, Gln, Arg, Ser, Thr, Val, Trp or Tyr
  MOD_RES (26)...(26): Xaa = Ala, Asp, Glu, Phe, Gly, His, Ile, Lys, Leu, Asn, Pro, Gln, Arg, Ser, Thr, Val or Tyr
  MOD_RES (27)...(27): Xaa = Ala, Asp, Glu, Phe, His, Ile, Lys, Leu, Met, Asn, Pro, Gln, Arg, Ser, Thr or Val
  MOD_RES (28)...(28): Xaa = Asp, Glu, Gly, Asn, Pro or Ser
  MOD_RES (29)...(29): Xaa = Ala, Asp, Glu, Phe, His, Leu, Met, Gln, Arg, Ser, Thr, Trp or Tyr
  MOD_RES (30)...(30): Xaa = Ala, Asp, Glu, Phe, Gly, His, Ile, Lys, Leu, Met, Asn, Gln, Arg, Ser, Thr, Val or Tyr
  MOD_RES (31)...(31): Xaa = Ala, Phe, Gly, Ile, Lys, Leu, Met, Pro, Gln, Arg, Ser, Thr, Val, Trp or Tyr
  MOD_RES (32)...(32): Xaa = Ala, Asp, Glu, Phe, Gly, His, Lys, Leu, Met, Asn, Pro, Gln, Arg, Ser, Thr, Val or Trp
  MOD_RES (33)...(33): Xaa = Ala, Asp, Glu, Gly, Ile, Lys, Leu, Met, Asn, Pro, Gln, Arg, Ser, Thr, Val or Tyr
  MOD_RES (34)...(34): Xaa = Ala, Asp, Glu, Phe, Gly, His, Ile, Lys, Leu, Met, Asn, Gln, Ser, Thr or Val
CXXXXXXCXXXXCXXXXXXXXXCXCXXXXXXXXXC

SEQ ID NO: 310 - protein, 36 aa, Artificial Sequence
  EGF domain monomer sequence
  MOD_RES (2)...(2): Xaa = Ala, Asp, Glu, Phe, Gly, Ile, Lys, Leu, Met, Asn, Pro, Gln, Arg, Ser, Thr, Val or Tyr
  MOD_RES (3)...(3): Xaa = Ala, Asp, Glu, Phe, Gly, His, Ile, Lys, Leu, Met, Asn, Pro, Gln, Arg, Ser, Thr, Val or Tyr
  MOD_RES (4)...(4): Xaa = Ala, Asp, Glu, Phe, Gly, His, Ile, Lys, Leu, Met, Asn, Pro, Gln, Arg, Ser, Thr, Val or Trp
  MOD_RES (5)...(5): Xaa = Ala, Asp, Glu, Phe, Gly, His, Ile, Lys, Leu, Met, Asn, Pro, Gln, Arg, Ser, Thr or Val
  MOD_RES (6)...(6): Xaa = Ala, Asp, Glu, Phe, Gly, His, Ile, Lys, Leu, Asn, Pro, Gln, Arg, Ser, Val or Tyr
  MOD_RES (7)...(7): Xaa = Ala, Asp, Glu, Gly, Ile, Lys, Leu, Met, Asn, Pro, Gln, Arg, Ser, Thr, Val or Tyr
  MOD_RES (9)...(9): Xaa = Ala, Asp, Glu, Phe, Gly, His, Ile, Lys, Leu, Met, Asn, Pro, Gln, Arg, Ser, Thr or Val
  MOD_RES (10)...(10): Xaa = Ala, Asp, Glu, Phe, Gly, His, Lys, Leu, Asn, Pro, Gln, Arg, Ser, Thr or Tyr
  MOD_RES (11)...(11): Xaa = Ala, Gly or Thr
  MOD_RES (12)...(12): Xaa = Ala, Asp, Glu, Phe, His, Ile, Lys, Leu, Met, Asn, Gln, Arg, Ser, Thr or Val
  MOD_RES (14)...(14): Xaa = Ala, Asp, Phe, His, Ile, Lys, Leu, Met, Asn, Gln, Arg, Ser, Thr, Val or Tyr
  MOD_RES (15)...(15): Xaa = Ala, Asp, Glu, Phe, His, Leu, Met, Asn, Pro, Gln, Arg, Ser, Val or Tyr
  MOD_RES (16)...(16): Xaa = Ala, Asp, Glu, Phe, Gly, His, Leu, Asn, Arg, Ser, Thr, Val or Tyr
  MOD_RES (17)...(17): Xaa = Ala, Asp, Glu, Gly, Asn, Pro, Gln, Arg, Ser or Thr
  MOD_RES (18)...(18): Xaa = Ala, Asp, Glu, Phe, Gly, Lys, Leu, Asn, Pro, Gln, Arg, Ser or Thr
  MOD_RES (19)...(19): Xaa = Ala, Asp, Glu, Gly, Met, Asn, Arg, Ser, Thr, Val or Tyr
  MOD_RES (20)...(20): Xaa = Ala, Asp, Glu, Gly, Lys, Leu, Met, Gln, Arg, Ser or Thr
  MOD_RES (21)...(21): Xaa = Phe, His, Ile, Pro, Arg, Val, Trp or Tyr
  MOD_RES (22)...(22): Xaa = Ala, Glu, His, Lys, Leu, Gln, Ser, Thr, Val or Tyr
  MOD_RES (24)...(24): Xaa = Ala, Asp, Glu, Phe, Gly, His, Ile, Lys, Leu, Met, Asn, Pro, Gln, Arg, Ser, Thr, Val, Trp or Tyr
  MOD_RES (26)...(26): Xaa = Ala, Asp, Glu, Phe, Gly, His, Ile, Lys, Leu, Asn, Pro, Gln, Arg, Ser, Thr, Val or Tyr
  MOD_RES (27)...(27): Xaa = Ala, Asp, Glu, Phe, His, Ile, Lys, Leu, Met, Asn, Pro, Gln, Arg, Ser, Thr or Val
  MOD_RES (28)...(28): Xaa = Asp, Glu, Gly, Asn, Pro or Ser
  MOD_RES (29)...(29): Xaa = Ala, Asp, Glu, Phe, His, Leu, Met, Gln, Arg, Ser, Thr, Trp or Tyr
  MOD_RES (30)...(30): Xaa = Ala, Asp, Glu, Phe, Gly, His, Ile, Lys, Leu, Met, Asn, Gln, Arg, Ser, Thr, Val or Tyr
  MOD_RES (31)...(31): Xaa = Ala, Phe, Gly, Ile, Lys, Leu, Met, Pro, Gln, Arg, Ser, Thr, Val, Trp or Tyr
  MOD_RES (32)...(32): Xaa = Ala, Asp, Glu, Phe, Gly, His, Lys, Leu, Met, Asn, Pro, Gln, Arg, Ser, Thr, Val or Trp
  MOD_RES (33)...(33): Xaa = Ala, Asp, Glu, Gly, Ile, Lys, Leu, Met, Asn, Pro, Gln, Arg, Ser, Thr, Val or Tyr
  MOD_RES (34)...(34): Xaa = Ala, Asp, Glu, Phe, Gly, His, Ile, Lys, Leu, Met, Asn, Gln, Ser, Thr or Val
  MOD_RES (35)...(35): Xaa = Glu, Phe, Gly, His, Ile, Lys, Leu, Met, Asn, Pro, Gln, Arg, Ser, Thr or Trp
CXXXXXXCXXXXCXXXXXXXXXCXCXXXXXXXXXXC

SEQ ID NO: 311 - protein, 37 aa, Artificial Sequence
  EGF domain monomer sequence
  MOD_RES (2)...(2): Xaa = Ala, Asp, Glu, Phe, Gly, Ile, Lys, Leu, Met, Asn, Pro, Gln, Arg, Ser, Thr, Val or Tyr
  MOD_RES (3)...(3): Xaa = Ala, Asp, Glu, Phe, Gly, His, Ile, Lys, Leu, Met, Asn, Pro, Gln, Arg, Ser, Thr, Val or Tyr
  MOD_RES (4)...(4): Xaa = Ala, Asp, Glu, Phe, Gly, His, Ile, Lys, Leu, Met, Asn, Pro, Gln, Arg, Ser, Thr, Val or Trp
  MOD_RES (5)...(5): Xaa = Ala, Asp, Glu, Phe, Gly, His, Ile, Lys, Leu, Met, Asn, Pro, Gln, Arg, Ser, Thr or Val
  MOD_RES (6)...(6): Xaa = Ala, Asp, Glu, Phe, Gly, His, Ile, Lys, Leu, Asn, Pro, Gln, Arg, Ser, Val or Tyr
  MOD_RES (7)...(7): Xaa = Ala, Asp, Glu, Gly, Ile, Lys, Leu, Met, Asn, Pro, Gln, Arg, Ser, Thr, Val or Tyr
  MOD_RES (9)...(9): Xaa = Ala, Asp, Glu, Phe, Gly, His, Ile, Lys, Leu, Met, Asn, Pro, Gln, Arg, Ser, Thr or Val
  MOD_RES (10)...(10): Xaa = Ala, Asp, Glu, Phe, Gly, His, Lys, Leu, Asn, Pro, Gln, Arg, Ser, Thr or Tyr
  MOD_RES (11)...(11): Xaa = Ala, Gly or Thr
  MOD_RES (12)...(12): Xaa = Ala, Asp, Glu, Phe, His, Ile, Lys, Leu, Met, Asn, Gln, Arg, Ser, Thr or Val
  MOD_RES (14)...(14): Xaa = Ala, Asp, Phe, His, Ile, Lys, Leu, Met, Asn, Gln, Arg, Ser, Thr, Val or Tyr
  MOD_RES (15)...(15): Xaa = Ala, Asp, Glu, Phe, His, Leu, Met, Asn, Pro, Gln, Arg, Ser, Val or Tyr
  MOD_RES (16)...(16): Xaa = Ala, Asp, Glu, Phe, Gly, His, Leu, Asn, Arg, Ser, Thr, Val or Tyr
  MOD_RES (17)...(17): Xaa = Ala, Asp, Glu, Gly, Asn, Pro, Gln, Arg, Ser or Thr
  MOD_RES (18)...(18): Xaa = Ala, Asp, Glu, Phe, Gly, Lys, Leu, Asn, Pro, Gln, Arg, Ser or Thr
  MOD_RES (19)...(19): Xaa = Ala, Asp, Glu, Gly, Met, Asn, Arg, Ser, Thr, Val or Tyr
  MOD_RES (20)...(20): Xaa = Ala, Asp, Glu, Gly, Lys, Leu, Met, Gln, Arg, Ser or Thr
  MOD_RES (21)...(21): Xaa = Phe, His, Ile, Pro, Arg, Val, Trp or Tyr
  MOD_RES (22)...(22): Xaa = Ala, Glu, His, Lys, Leu, Gln, Ser, Thr, Val or Tyr
  MOD_RES (24)...(24): Xaa = Ala, Asp, Glu, Phe, Gly, His, Ile, Lys, Leu, Met, Asn, Pro, Gln, Arg, Ser, Thr, Val, Trp or Tyr
  MOD_RES (26)...(26): Xaa = Ala, Asp, Glu, Phe, Gly, His, Ile, Lys, Leu, Asn, Pro, Gln, Arg, Ser, Thr, Val or Tyr
  MOD_RES (27)...(27): Xaa = Ala, Asp, Glu, Phe, His, Ile, Lys, Leu, Met, Asn, Pro, Gln, Arg, Ser, Thr or Val
  MOD_RES (28)...(28): Xaa = Asp, Glu, Gly, Asn, Pro or Ser
  MOD_RES (29)...(29): Xaa = Ala, Asp, Glu, Phe, His, Leu, Met, Gln, Arg, Ser, Thr, Trp or Tyr
  MOD_RES (30)...(30): Xaa = Ala, Asp, Glu, Phe, Gly, His, Ile, Lys, Leu, Met, Asn, Gln, Arg, Ser, Thr, Val or Tyr
  MOD_RES (31)...(31): Xaa = Ala, Phe, Gly, Ile, Lys, Leu, Met, Pro, Gln, Arg, Ser, Thr, Val, Trp or Tyr
  MOD_RES (32)...(32): Xaa = Ala, Asp, Glu, Phe, Gly, His, Lys, Leu, Met, Asn, Pro, Gln, Arg, Ser, Thr, Val or Trp
  MOD_RES (33)...(33): Xaa = Ala, Asp, Glu, Gly, Ile, Lys, Leu, Met, Asn, Pro, Gln, Arg, Ser, Thr, Val or Tyr
  MOD_RES (34)...(34): Xaa = Ala, Asp, Glu, Phe, Gly, His, Ile, Lys, Leu, Met, Asn, Gln, Ser, Thr or Val
  MOD_RES (35)...(35): Xaa = Glu, Phe, Gly, His, Ile, Lys, Leu, Met, Asn, Pro, Gln, Arg, Ser, Thr or Trp
  MOD_RES (36)...(36): Xaa = Ala, Asp, Glu, Phe, Gly, His, Lys, Leu, Met, Asn, Pro, Gln, Arg, Ser, Thr, Val or Tyr
CXXXXXXCXXXXCXXXXXXXXXCXCXXXXXXXXXXXC

SEQ ID NO: 312 - protein, 38 aa, Artificial Sequence
  EGF domain monomer sequence
  MOD_RES (2)...(2): Xaa = Ala, Asp, Glu, Phe, Gly, Ile, Lys, Leu, Met, Asn, Pro, Gln, Arg, Ser, Thr, Val or Tyr
  MOD_RES (3)...(3): Xaa = Ala, Asp, Glu, Phe, Gly, His, Ile, Lys, Leu, Met, Asn, Pro, Gln, Arg, Ser, Thr, Val or Tyr
  MOD_RES (4)...(4): Xaa = Ala, Asp, Glu, Phe, Gly, His, Ile, Lys, Leu, Met, Asn, Pro, Gln, Arg, Ser, Thr, Val or Trp
  MOD_RES (5)...(5): Xaa = Ala, Asp, Glu, Phe, Gly, His, Ile, Lys, Leu, Met, Asn, Pro, Gln, Arg, Ser, Thr or Val
  MOD_RES (6)...(6): Xaa = Ala, Asp, Glu, Phe, Gly, His, Ile, Lys, Leu, Asn, Pro, Gln, Arg, Ser, Val or Tyr
  MOD_RES (7)...(7): Xaa = Ala, Asp, Glu, Gly, Ile, Lys, Leu, Met, Asn, Pro, Gln, Arg, Ser, Thr, Val or Tyr
  MOD_RES (9)...(9): Xaa = Ala, Asp, Glu, Phe, Gly, His, Ile, Lys, Leu, Met, Asn, Pro, Gln, Arg, Ser, Thr or Val
  MOD_RES (10)...(10): Xaa = Ala, Asp, Glu, Phe, Gly, His, Lys, Leu, Asn, Pro, Gln, Arg, Ser, Thr or Tyr
  MOD_RES (11)...(11): Xaa = Ala, Gly or Thr
  MOD_RES (12)...(12): Xaa = Ala, Asp, Glu, Phe, His, Ile, Lys, Leu, Met, Asn, Gln, Arg, Ser, Thr or Val
  MOD_RES (14)...(14): Xaa = Ala, Asp, Phe, His, Ile, Lys, Leu, Met, Asn, Gln, Arg, Ser, Thr, Val or Tyr
  MOD_RES (15)...(15): Xaa = Ala, Asp, Glu, Phe, His, Leu, Met, Asn, Pro, Gln, Arg, Ser, Val or Tyr
  MOD_RES (16)...(16): Xaa = Ala, Asp, Glu, Phe, Gly, His, Leu, Asn, Arg, Ser, Thr, Val or Tyr
  MOD_RES (17)...(17): Xaa = Ala, Asp, Glu, Gly, Asn, Pro, Gln, Arg, Ser or Thr
  MOD_RES (18)...(18): Xaa = Ala, Asp, Glu, Phe, Gly, Lys, Leu, Asn, Pro, Gln, Arg, Ser or Thr
  MOD_RES (19)...(19): Xaa = Ala, Asp, Glu, Gly, Met, Asn, Arg, Ser, Thr, Val or Tyr
  MOD_RES (20)...(20): Xaa = Ala, Asp, Glu, Gly, Lys, Leu, Met, Gln, Arg, Ser or Thr
  MOD_RES (21)...(21): Xaa = Phe, His, Ile, Pro, Arg, Val, Trp or Tyr
  MOD_RES (22)...(22): Xaa = Ala, Glu, His, Lys, Leu, Gln, Ser, Thr, Val or Tyr
  MOD_RES (24)...(24): Xaa = Ala, Asp, Glu, Phe, Gly, His, Ile, Lys, Leu, Met, Asn, Pro, Gln, Arg, Ser, Thr, Val, Trp or Tyr
  MOD_RES (26)...(26): Xaa = Ala, Asp, Glu, Phe, Gly, His, Ile, Lys, Leu, Asn, Pro, Gln, Arg, Ser, Thr, Val or Tyr
  MOD_RES (27)...(27): Xaa = Ala, Asp, Glu, Phe, His, Ile, Lys, Leu, Met, Asn, Pro, Gln, Arg, Ser, Thr or Val
  MOD_RES (28)...(28): Xaa = Asp, Glu, Gly, Asn, Pro or Ser
  MOD_RES (29)...(29): Xaa = Ala, Asp, Glu, Phe, His, Leu, Met, Gln, Arg, Ser, Thr, Trp or Tyr
  MOD_RES (30)...(30): Xaa = Ala, Asp, Glu, Phe, Gly, His, Ile, Lys, Leu, Met, Asn, Gln, Arg, Ser, Thr, Val or Tyr
  MOD_RES (31)...(31): Xaa = Ala, Phe, Gly, Ile, Lys, Leu, Met, Pro, Gln, Arg, Ser, Thr, Val, Trp or Tyr
  MOD_RES (32)...(32): Xaa = Ala, Asp, Glu, Phe, Gly, His, Lys, Leu, Met, Asn, Pro, Gln, Arg, Ser, Thr, Val or Trp
  MOD_RES (33)...(33): Xaa = Ala, Asp, Glu, Gly, Ile, Lys, Leu, Met, Asn, Pro, Gln, Arg, Ser, Thr, Val or Tyr
  MOD_RES (34)...(34): Xaa = Ala, Asp, Glu, Phe, Gly, His, Ile, Lys, Leu, Met, Asn, Gln, Ser, Thr or Val
  MOD_RES (35)...(35): Xaa = Glu, Phe, Gly, His, Ile, Lys, Leu, Met, Asn, Pro, Gln, Arg, Ser, Thr or Trp
  MOD_RES (36)...(36): Xaa = Ala, Asp, Glu, Phe, Gly, His, Lys, Leu, Met, Asn, Pro, Gln, Arg, Ser, Thr, Val or Tyr
  MOD_RES (37)...(37): Xaa = Ala, Asp, Glu, Phe, Gly, His, Ile, Lys, Met, Asn, Gln, Arg, Ser, Thr, Val or Tyr
CXXXXXXCXXXXCXXXXXXXXXCXCXXXXXXXXXXXXC

SEQ ID NO: 313 - protein, 34 aa, Artificial Sequence
  EGF domain monomer sequence
  MOD_RES (2)...(2): Xaa = Ala, Asp, Glu, Gly, Ile, Lys, Leu, Gln, Arg, Ser, Thr or Val
  MOD_RES (3)...(3): Xaa = Ala, Asp, Glu, Phe, Gly, His, Ile, Lys, Leu, Met, Asn, Pro, Gln, Arg, Ser, Thr or Val
  MOD_RES (4)...(4): Xaa = Ala, Glu, Phe, Gly, His, Leu, Asn, Pro, Gln, Arg, Ser, Thr, Trp or Tyr
  MOD_RES (5)...(5): Xaa = Ala, Asp, Glu, Phe, Gly, His, Ile, Lys, Leu, Asn, Pro, Arg, Ser or Thr
  MOD_RES (6)...(6): Xaa = Ala, Phe, Gly, Ile, Lys, Leu, Met, Asn, Pro, Gln, Arg, Ser, Thr, Val or Tyr
  MOD_RES (8)...(8): Xaa = Ala, Cys, Asp, Glu, Phe, Gly, His, Lys, Leu, Met, Asn, Pro, Gln, Arg, Ser, Val or Tyr
  MOD_RES (9)...(9): Xaa = Ala, Asp, Glu, Gly, His, Ile, Lys, Leu, Met, Asn, Pro, Gln, Arg, Ser, Thr, Val or Tyr
  MOD_RES (10)...(10): Xaa = Ala, Asp, Glu, Phe, Gly, His, Lys, Leu, Asn, Gln, Arg, Ser, Thr or Tyr
  MOD_RES (11)...(11): Xaa = Ala, Phe, Gly, His, Gln, Ser, Thr or Val
  MOD_RES (12)...(12): Xaa = Ala, Asp, Glu, Phe, His, Ile, Lys, Leu, Met, Asn, Gln, Arg, Ser, Thr or Val
  MOD_RES (14)...(14): Xaa = Ala, Asp, Phe, His, Ile, Lys, Leu, Met, Asn, Gln, Arg, Ser, Thr, Val or Tyr
  MOD_RES (15)...(15): Xaa = Ala, Asp, Glu, Phe, His, Leu, Met, Asn, Pro, Gln, Arg, Ser, Val or Tyr
  MOD_RES (16)...(16): Xaa = Ala, Asp, Glu, Phe, Gly, His, Leu, Asn, Arg, Ser, Thr, Val or Tyr
  MOD_RES (17)...(17): Xaa = Ala, Asp, Glu, Gly, Asn, Pro, Gln, Arg, Ser or Thr
  MOD_RES (18)...(18): Xaa = Ala, Asp, Glu, Phe, Gly, Lys, Leu, Asn, Pro, Gln, Arg, Ser or Thr
  MOD_RES (19)...(19): Xaa = Ala, Asp, Glu, Gly, Met, Asn, Arg, Ser, Thr, Val or Tyr
  MOD_RES (20)...(20): Xaa = Ala, Asp, Glu, Gly, Lys, Leu, Met, Gln, Arg, Ser or Thr
  MOD_RES (21)...(21): Xaa = Phe, His, Ile, Pro, Arg, Val, Trp or Tyr
  MOD_RES (22)...(22): Xaa = Ala, Glu, His, Lys, Leu, Gln, Ser, Thr, Val or Tyr
  MOD_RES (24)...(24): Xaa = Ala, Asp, Glu, Phe, Gly, His, Ile, Lys, Leu, Met, Asn, Pro, Gln, Arg, Ser, Thr, Val, Trp or Tyr
  MOD_RES (26)...(26): Xaa = Ala, Asp, Glu, Phe, His, Lys, Leu, Met, Asn, Pro, Gln, Arg, Ser, Thr, Val, Trp or Tyr
  MOD_RES (27)...(27): Xaa = Ala, Asp, Glu, Phe, Gly, His, Lys, Leu, Asn, Pro, Gln, Arg, Ser, Thr, Val or Tyr
  MOD_RES (28)...(28): Xaa = Ala, Glu, Gly, His, Lys, Leu, Asn, Pro, Arg, Ser, Thr or Tyr
  MOD_RES (29)...(29): Xaa = Phe, His, Ile, Leu, Met, Arg, Thr, Trp or Tyr
  MOD_RES (30)...(30): Xaa = Ala, Asp, Glu, Phe, Gly, His, Ile, Lys, Leu, Met, Asn, Gln, Arg, Ser, Thr, Val or Tyr
  MOD_RES (31)...(31): Xaa = Asp, Gly or Ser
  MOD_RES (32)...(32): Xaa = Ala, Asp, Glu, Phe, His, Ile, Lys, Leu, Asn, Pro, Gln, Arg, Ser, Thr, Val or Tyr
  MOD_RES (33)...(33): Xaa = Ala, Asp, Glu, Phe, His, Ile, Lys, Leu, Met, Asn, Gln, Arg, Ser, Thr or Tyr
CXXXXXCXXXXXCXXXXXXXXXCXCXXXXXXXXC

SEQ ID NO: 314 - protein, 35 aa, Artificial Sequence
  EGF domain monomer sequence
  MOD_RES (2)...(2): Xaa = Ala, Asp, Glu, Gly, Ile, Lys, Leu, Gln, Arg, Ser, Thr or Val
  MOD_RES (3)...(3): Xaa = Ala, Asp, Glu, Phe, Gly, His, Ile, Lys, Leu, Met, Asn, Pro, Gln, Arg, Ser, Thr or Val
  MOD_RES (4)...(4): Xaa = Ala, Glu, Phe, Gly, His, Leu, Asn, Pro, Gln, Arg, Ser, Thr, Trp or Tyr
  MOD_RES (5)...(5): Xaa = Ala, Asp, Glu, Phe, Gly, His, Ile, Lys, Leu, Asn, Pro, Arg, Ser or Thr
  MOD_RES (6)...(6): Xaa = Ala, Phe, Gly, Ile, Lys, Leu, Met, Asn, Pro, Gln, Arg, Ser, Thr, Val or Tyr
  MOD_RES (8)...(8): Xaa = Ala, Cys, Asp, Glu, Phe, Gly, His, Lys, Leu, Met, Asn, Pro, Gln, Arg, Ser, Val or Tyr
  MOD_RES (9)...(9): Xaa = Ala, Asp, Glu, Gly, His, Ile, Lys, Leu, Met, Asn, Pro, Gln, Arg, Ser, Thr, Val or Tyr
  MOD_RES (10)...(10): Xaa = Ala, Asp, Glu, Phe, Gly, His, Lys, Leu, Asn, Gln, Arg, Ser, Thr or Tyr
  MOD_RES (11)...(11): Xaa = Ala, Phe, Gly, His, Gln, Ser, Thr or Val
  MOD_RES (12)...(12): Xaa = Ala, Asp, Glu, Phe, His, Ile, Lys, Leu, Met, Asn, Gln, Arg, Ser, Thr or Val
  MOD_RES (14)...(14): Xaa = Ala, Asp, Phe, His, Ile, Lys, Leu, Met, Asn, Gln, Arg, Ser, Thr, Val or Tyr
  MOD_RES (15)...(15): Xaa = Ala, Asp, Glu, Phe, His, Leu, Met, Asn, Pro, Gln, Arg, Ser, Val or Tyr
  MOD_RES (16)...(16): Xaa = Ala, Asp, Glu, Phe, Gly, His, Leu, Asn, Arg, Ser, Thr, Val or Tyr
  MOD_RES (17)...(17): Xaa = Ala, Asp, Glu, Gly, Asn, Pro, Gln, Arg, Ser or Thr
  MOD_RES (18)...(18): Xaa = Ala, Asp, Glu, Phe, Gly, Lys, Leu, Asn, Pro, Gln, Arg, Ser or Thr
  MOD_RES (19)...(19): Xaa = Ala, Asp, Glu, Gly, Met, Asn, Arg, Ser, Thr, Val or Tyr
  MOD_RES (20)...(20): Xaa = Ala, Asp, Glu, Gly, Lys, Leu, Met, Gln, Arg, Ser or Thr
  MOD_RES (21)...(21): Xaa = Phe, His, Ile, Pro, Arg, Val, Trp or Tyr
  MOD_RES (22)...(22): Xaa = Ala, Glu, His, Lys, Leu, Gln, Ser, Thr, Val or Tyr
  MOD_RES (24)...(24): Xaa = Ala, Asp, Glu, Phe, Gly, His, Ile, Lys, Leu, Met, Asn, Pro, Gln, Arg, Ser, Thr, Val, Trp or Tyr
  MOD_RES (26)...(26): Xaa = Ala, Asp, Glu, Phe, Gly, His, Ile, Lys, Leu, Asn, Pro, Gln, Arg, Ser, Thr, Val or Tyr
  MOD_RES (27)...(27): Xaa = Ala, Asp, Glu, Phe, His, Ile, Lys, Leu, Met, Asn, Pro, Gln, Arg, Ser, Thr or Val
  MOD_RES (28)...(28): Xaa = Asp, Glu, Gly, Asn, Pro or Ser
  MOD_RES (29)...(29): Xaa = Ala, Asp, Glu, Phe, His, Leu, Met, Gln, Arg, Ser, Thr, Trp or Tyr
  MOD_RES (30)...(30): Xaa = Ala, Asp, Glu, Phe, Gly, His, Ile, Lys, Leu, Met, Asn, Gln, Arg, Ser, Thr, Val or Tyr
  MOD_RES (31)...(31): Xaa = Ala, Phe, Gly, Ile, Lys, Leu, Met, Pro, Gln, Arg, Ser, Thr, Val, Trp or Tyr
  MOD_RES (32)...(32): Xaa = Ala, Asp, Glu, Phe, Gly, His, Lys, Leu, Met, Asn, Pro, Gln, Arg, Ser, Thr, Val or Trp
  MOD_RES (33)...(33): Xaa = Ala, Asp, Glu, Gly, Ile, Lys, Leu, Met, Asn, Pro, Gln, Arg, Ser, Thr, Val or Tyr
  MOD_RES (34)...(34): Xaa = Ala, Asp, Glu, Phe, Gly, His, Ile, Lys, Leu, Met, Asn, Gln, Ser, Thr or Val
CXXXXXCXXXXXCXXXXXXXXXCXCXXXXXXXXXC

SEQ ID NO: 315 - protein, 36 aa, Artificial Sequence
  EGF domain monomer sequence
  MOD_RES (2)...(2): Xaa = Ala, Asp, Glu, Gly, Ile, Lys, Leu, Gln, Arg, Ser, Thr or Val
  MOD_RES (3)...(3): Xaa = Ala, Asp, Glu, Phe, Gly, His, Ile, Lys, Leu, Met, Asn, Pro, Gln, Arg, Ser, Thr or Val
  MOD_RES (4)...(4): Xaa = Ala, Glu, Phe, Gly, His, Leu, Asn, Pro, Gln, Arg, Ser, Thr, Trp or Tyr
  MOD_RES (5)...(5): Xaa = Ala, Asp, Glu, Phe, Gly, His, Ile, Lys, Leu, Asn, Pro, Arg, Ser or Thr
  MOD_RES (6)...(6): Xaa = Ala, Phe, Gly, Ile, Lys, Leu, Met, Asn, Pro, Gln, Arg, Ser, Thr, Val or Tyr
  MOD_RES (8)...(8): Xaa = Ala, Cys, Asp, Glu, Phe, Gly, His, Lys, Leu, Met, Asn, Pro, Gln, Arg, Ser, Val or Tyr
  MOD_RES (9)...(9): Xaa = Ala, Asp, Glu, Gly, His, Ile, Lys, Leu, Met, Asn, Pro, Gln, Arg, Ser, Thr, Val or Tyr
  MOD_RES (10)...(10): Xaa = Ala, Asp, Glu, Phe, Gly, His, Lys, Leu, Asn, Gln, Arg, Ser, Thr or Tyr
  MOD_RES (11)...(11): Xaa = Ala, Phe, Gly, His, Gln, Ser, Thr or Val
  MOD_RES (12)...(12): Xaa = Ala, Asp, Glu, Phe, His, Ile, Lys, Leu, Met, Asn, Gln, Arg, Ser, Thr or Val
  MOD_RES (14)...(14): Xaa = Ala, Asp, Phe, His, Ile, Lys, Leu, Met, Asn, Gln, Arg, Ser, Thr, Val or Tyr
  MOD_RES (15)...(15): Xaa = Ala, Asp, Glu, Phe, His, Leu, Met, Asn, Pro, Gln, Arg, Ser, Val or Tyr
  MOD_RES (16)...(16): Xaa = Ala, Asp, Glu, Phe, Gly, His, Leu, Asn, Arg, Ser, Thr, Val or Tyr
  MOD_RES (17)...(17): Xaa = Ala, Asp, Glu, Gly, Asn, Pro, Gln, Arg, Ser or Thr
  MOD_RES (18)...(18): Xaa = Ala, Asp, Glu, Phe, Gly, Lys, Leu, Asn, Pro, Gln, Arg, Ser or Thr
  MOD_RES (19)...(19): Xaa = Ala, Asp, Glu, Gly, Met, Asn, Arg, Ser, Thr, Val or Tyr
  MOD_RES (20)...(20): Xaa = Ala, Asp, Glu, Gly, Lys, Leu, Met, Gln, Arg, Ser or Thr
  MOD_RES (21)...(21): Xaa = Phe, His, Ile, Pro, Arg, Val, Trp or Tyr
  MOD_RES (22)...(22): Xaa = Ala, Glu, His, Lys, Leu, Gln, Ser, Thr, Val or Tyr
  MOD_RES (24)...(24): Xaa = Ala, Asp, Glu, Phe, Gly, His, Ile, Lys, Leu, Met, Asn, Pro, Gln, Arg, Ser, Thr, Val, Trp or Tyr
  MOD_RES (26)...(26): Xaa = Ala, Asp, Glu, Phe, Gly, His, Ile, Lys, Leu, Asn, Pro, Gln, Arg, Ser, Thr, Val or Tyr
  MOD_RES (27)...(27): Xaa = Ala, Asp, Glu, Phe, His, Ile, Lys, Leu, Met, Asn, Pro, Gln, Arg, Ser, Thr or Val
  MOD_RES (28)...(28): Xaa = Asp, Glu, Gly, Asn, Pro or Ser
  MOD_RES (29)...(29): Xaa = Ala, Asp, Glu, Phe, His, Leu, Met, Gln, Arg, Ser, Thr, Trp or Tyr
  MOD_RES (30)...(30): Xaa = Ala, Asp, Glu, Phe, Gly, His, Ile, Lys, Leu, Met, Asn, Gln, Arg, Ser, Thr, Val or Tyr
  MOD_RES (31)...(31): Xaa = Ala, Phe, Gly, Ile, Lys, Leu, Met, Pro, Gln, Arg, Ser, Thr, Val, Trp or Tyr
  MOD_RES (32)...(32): Xaa = Ala, Asp, Glu, Phe, Gly, His, Lys, Leu, Met, Asn, Pro, Gln, Arg, Ser, Thr, Val or Trp
  MOD_RES (33)...(33): Xaa = Ala, Asp, Glu, Gly, Ile, Lys, Leu, Met, Asn, Pro, Gln, Arg, Ser, Thr, Val or Tyr
  MOD_RES (34)...(34): Xaa = Ala, Asp, Glu, Phe, Gly, His, Ile, Lys, Leu, Met, Asn, Gln, Ser, Thr or Val
  MOD_RES (35)...(35): Xaa = Glu, Phe, Gly, His, Ile, Lys, Leu, Met, Asn, Pro, Gln, Arg, Ser, Thr or Trp
CXXXXXCXXXXXCXXXXXXXXXCXCXXXXXXXXXXC

SEQ ID NO: 316 - protein, 37 aa, Artificial Sequence
  EGF domain monomer sequence
  MOD_RES (2)...(2): Xaa = Ala, Asp, Glu, Gly, Ile, Lys, Leu, Gln, Arg, Ser, Thr or Val
  MOD_RES (3)...(3): Xaa = Ala, Asp, Glu, Phe, Gly, His, Ile, Lys, Leu, Met, Asn, Pro, Gln, Arg, Ser, Thr or Val
  MOD_RES (4)...(4): Xaa = Ala, Glu, Phe, Gly, His, Leu, Asn, Pro, Gln, Arg, Ser, Thr, Trp or Tyr
  MOD_RES (5)...(5): Xaa = Ala, Asp, Glu, Phe, Gly, His, Ile, Lys, Leu, Asn, Pro, Arg, Ser or Thr
  MOD_RES (6)...(6): Xaa = Ala, Phe, Gly, Ile, Lys, Leu, Met, Asn, Pro, Gln, Arg, Ser, Thr, Val or Tyr
  MOD_RES (8)...(8): Xaa = Ala, Cys, Asp, Glu, Phe, Gly, His, Lys, Leu, Met, Asn, Pro, Gln, Arg, Ser, Val or Tyr
  MOD_RES (9)...(9): Xaa = Ala, Asp, Glu, Gly, His, Ile, Lys, Leu, Met, Asn, Pro, Gln, Arg, Ser, Thr, Val or Tyr
  MOD_RES (10)...(10): Xaa = Ala, Asp, Glu, Phe, Gly, His, Lys, Leu, Asn, Gln, Arg, Ser, Thr or Tyr
  MOD_RES (11)...(11): Xaa = Ala, Phe, Gly, His, Gln, Ser, Thr or Val
  MOD_RES (12)...(12): Xaa = Ala, Asp, Glu, Phe, His, Ile, Lys, Leu, Met, Asn, Gln, Arg, Ser, Thr or Val
  MOD_RES (14)...(14): Xaa = Ala, Asp, Phe, His, Ile, Lys, Leu, Met, Asn, Gln, Arg, Ser, Thr, Val or Tyr
  MOD_RES (15)...(15): Xaa = Ala, Asp, Glu, Phe, His, Leu, Met, Asn, Pro, Gln, Arg, Ser, Val or Tyr
  MOD_RES (16)...(16): Xaa = Ala, Asp, Glu, Phe, Gly, His, Leu, Asn, Arg, Ser, Thr, Val or Tyr
  MOD_RES (17)...(17): Xaa = Ala, Asp, Glu, Gly, Asn, Pro, Gln, Arg, Ser or Thr
  MOD_RES (18)...(18): Xaa = Ala, Asp, Glu, Phe, Gly, Lys, Leu, Asn, Pro, Gln, Arg, Ser or Thr
  MOD_RES (19)...(19): Xaa = Ala, Asp, Glu, Gly, Met, Asn, Arg, Ser, Thr, Val or Tyr
  MOD_RES (20)...(20): Xaa = Ala, Asp, Glu, Gly, Lys, Leu, Met, Gln, Arg, Ser or Thr
  MOD_RES (21)...(21): Xaa = Phe, His, Ile, Pro, Arg, Val, Trp or Tyr
  MOD_RES (22)...(22): Xaa = Ala, Glu, His, Lys, Leu, Gln, Ser, Thr, Val or Tyr
  MOD_RES (24)...(24): Xaa = Ala, Asp, Glu, Phe, Gly, His, Ile, Lys, Leu, Met, Asn, Pro, Gln, Arg, Ser, Thr, Val, Trp or Tyr
  MOD_RES (26)...(26): Xaa = Ala, Asp, Glu, Phe, Gly, His, Ile, Lys, Leu, Asn, Pro, Gln, Arg, Ser, Thr, Val or Tyr
  MOD_RES (27)...(27): Xaa = Ala, Asp, Glu, Phe, His, Ile, Lys, Leu, Met, Asn, Pro, Gln, Arg, Ser, Thr or Val
  MOD_RES (28)...(28): Xaa = Asp, Glu, Gly, Asn, Pro or Ser
  MOD_RES (29)...(29): Xaa = Ala, Asp, Glu, Phe, His, Leu, Met, Gln, Arg, Ser, Thr, Trp or Tyr
  MOD_RES (30)...(30): Xaa = Ala, Asp, Glu, Phe, Gly, His, Ile, Lys, Leu, Met, Asn, Gln, Arg, Ser, Thr, Val or Tyr
  MOD_RES (31)...(31): Xaa = Ala, Phe, Gly, Ile, Lys, Leu, Met, Pro, Gln, Arg, Ser, Thr, Val, Trp or Tyr
  MOD_RES (32)...(32): Xaa = Ala, Asp, Glu, Phe, Gly, His, Lys, Leu, Met, Asn, Pro, Gln, Arg, Ser, Thr, Val or Trp
  MOD_RES (33)...(33): Xaa = Ala, Asp, Glu, Gly, Ile, Lys, Leu, Met, Asn, Pro, Gln, Arg, Ser, Thr, Val or Tyr
  MOD_RES (34)...(34): Xaa = Ala, Asp, Glu, Phe, Gly, His, Ile, Lys, Leu, Met, Asn, Gln, Ser, Thr or Val
  MOD_RES (35)...(35): Xaa = Glu, Phe, Gly, His, Ile, Lys, Leu, Met, Asn, Pro, Gln, Arg, Ser, Thr or Trp
  MOD_RES (36)...(36): Xaa = Ala, Asp, Glu, Phe, Gly, His, Lys, Leu, Met, Asn, Pro, Gln, Arg, Ser, Thr, Val or Tyr
CXXXXXCXXXXXCXXXXXXXXXCXCXXXXXXXXXXXC

SEQ ID NO: 317 - protein, 38 aa, Artificial Sequence
  EGF domain monomer sequence
  MOD_RES (2)...(2): Xaa = Ala, Asp, Glu, Gly, Ile, Lys, Leu, Gln, Arg, Ser, Thr or Val
  MOD_RES (3)...(3): Xaa = Ala, Asp, Glu, Phe, Gly, His, Ile, Lys, Leu, Met, Asn, Pro, Gln, Arg, Ser, Thr or Val
  MOD_RES (4)...(4): Xaa = Ala, Glu, Phe, Gly, His, Leu, Asn, Pro, Gln, Arg, Ser, Thr, Trp or Tyr
  MOD_RES (5)...(5): Xaa = Ala, Asp, Glu, Phe, Gly, His, Ile, Lys, Leu, Asn, Pro, Arg, Ser or Thr
  MOD_RES (6)...(6): Xaa = Ala, Phe, Gly, Ile, Lys, Leu, Met, Asn, Pro, Gln, Arg, Ser, Thr, Val or Tyr
  MOD_RES (8)...(8): Xaa = Ala, Cys, Asp, Glu, Phe, Gly, His, Lys, Leu, Met, Asn, Pro, Gln, Arg, Ser, Val or Tyr
  MOD_RES (9)...(9): Xaa = Ala, Asp, Glu, Gly, His, Ile, Lys, Leu, Met, Asn, Pro, Gln, Arg, Ser, Thr, Val or Tyr
  MOD_RES (10)...(10): Xaa = Ala, Asp, Glu, Phe, Gly, His, Lys, Leu, Asn, Gln, Arg, Ser, Thr or Tyr
  MOD_RES (11)...(11): Xaa = Ala, Phe, Gly, His, Gln, Ser, Thr or Val
  MOD_RES (12)...(12): Xaa = Ala, Asp, Glu, Phe, His, Ile, Lys, Leu, Met, Asn, Gln, Arg, Ser, Thr or Val
  MOD_RES (14)...(14): Xaa = Ala, Asp, Phe, His, Ile, Lys, Leu, Met, Asn, Gln, Arg, Ser, Thr, Val or Tyr
  MOD_RES (15)...(15): Xaa = Ala, Asp, Glu, Phe, His, Leu, Met, Asn, Pro, Gln, Arg, Ser, Val or Tyr
  MOD_RES (16)...(16): Xaa = Ala, Asp, Glu, Phe, Gly, His, Leu, Asn, Arg, Ser, Thr, Val or Tyr
  MOD_RES (17)...(17): Xaa = Ala, Asp, Glu, Gly, Asn, Pro, Gln, Arg, Ser or Thr
  MOD_RES (18)...(18): Xaa = Ala, Asp, Glu, Phe, Gly, Lys, Leu, Asn, Pro, Gln, Arg, Ser or Thr
  MOD_RES (19)...(19): Xaa = Ala, Asp, Glu, Gly, Met, Asn, Arg, Ser, Thr, Val or Tyr
  MOD_RES (20)...(20): Xaa = Ala, Asp, Glu, Gly, Lys, Leu, Met, Gln, Arg, Ser or Thr
  MOD_RES (21)...(21): Xaa = Phe, His, Ile, Pro, Arg, Val, Trp or Tyr
  MOD_RES (22)...(22): Xaa = Ala, Glu, His, Lys, Leu, Gln, Ser, Thr, Val or Tyr
  MOD_RES (24)...(24): Xaa = Ala, Asp, Glu, Phe, Gly, His, Ile, Lys, Leu, Met, Asn, Pro, Gln, Arg, Ser, Thr, Val, Trp or Tyr
  MOD_RES (26)...(26): Xaa = Ala, Asp, Glu, Phe, Gly, His, Ile, Lys, Leu, Asn, Pro, Gln, Arg, Ser, Thr, Val or Tyr
  MOD_RES (27)...(27): Xaa = Ala, Asp, Glu, Phe, His, Ile, Lys, Leu, Met, Asn, Pro, Gln, Arg, Ser, Thr or Val
  MOD_RES (28)...(28): Xaa = Asp, Glu, Gly, Asn, Pro or Ser
  MOD_RES (29)...(29): Xaa = Ala, Asp, Glu, Phe, His, Leu, Met, Gln, Arg, Ser, Thr, Trp or Tyr
  MOD_RES (30)...(30): Xaa = Ala, Asp, Glu, Phe, Gly, His, Ile, Lys, Leu, Met, Asn, Gln, Arg, Ser, Thr, Val or Tyr
  MOD_RES (31)...(31): Xaa = Ala, Phe, Gly, Ile, Lys, Leu, Met, Pro, Gln, Arg, Ser, Thr, Val, Trp or Tyr
  MOD_RES (32)...(32): Xaa = Ala, Asp, Glu, Phe, Gly, His, Lys, Leu, Met, Asn, Pro, Gln, Arg, Ser, Thr, Val or Trp
  MOD_RES (33)...(33): Xaa = Ala, Asp, Glu, Gly, Ile, Lys, Leu, Met, Asn, Pro, Gln, Arg, Ser, Thr, Val or Tyr
  MOD_RES (34)...(34): Xaa = Ala, Asp, Glu, Phe, Gly, His, Ile, Lys, Leu, Met, Asn, Gln, Ser, Thr or Val
  MOD_RES (35)...(35): Xaa = Glu, Phe, Gly, His, Ile, Lys, Leu, Met, Asn, Pro, Gln, Arg, Ser, Thr or Trp
  MOD_RES (36)...(36): Xaa = Ala, Asp, Glu, Phe, Gly, His, Lys, Leu, Met, Asn, Pro, Gln, Arg, Ser, Thr, Val or Tyr
  MOD_RES (37)...(37): Xaa = Ala, Asp, Glu, Phe, Gly, His, Ile, Lys, Met, Asn, Gln, Arg, Ser, Thr, Val or Tyr
CXXXXXCXXXXXCXXXXXXXXXCXCXXXXXXXXXXXXC

SEQ ID NO: 318 - protein, 35 aa, Artificial Sequence
  EGF domain monomer sequence
  MOD_RES (2)...(2): Xaa = Ala, Asp, Glu, Phe, Gly, Ile, Lys, Leu, Met, Asn, Pro, Gln, Arg, Ser, Thr, Val or Tyr
  MOD_RES (3)...(3): Xaa = Ala, Asp, Glu, Phe, Gly, His, Ile, Lys, Leu, Met, Asn, Pro, Gln, Arg, Ser, Thr, Val or Tyr
  MOD_RES (4)...(4): Xaa = Ala, Asp, Glu, Phe, Gly, His, Ile, Lys, Leu, Met, Asn, Pro, Gln, Arg, Ser, Thr, Val or Trp
  MOD_RES (5)...(5): Xaa = Ala, Asp, Glu, Phe, Gly, His, Ile, Lys, Leu, Met, Asn, Pro, Gln, Arg, Ser, Thr or Val
  MOD_RES (6)...(6): Xaa = Ala, Asp, Glu, Phe, Gly, His, Ile, Lys, Leu, Asn, Pro, Gln, Arg, Ser, Val or Tyr
  MOD_RES (7)...(7): Xaa = Ala, Asp, Glu, Gly, Ile, Lys, Leu, Met, Asn, Pro, Gln, Arg, Ser, Thr, Val or Tyr
  MOD_RES (9)...(9): Xaa = Ala, Cys, Asp, Glu, Phe, Gly, His, Lys, Leu, Met, Asn, Pro, Gln, Arg, Ser, Val or Tyr
  MOD_RES (10)...(10): Xaa = Ala, Asp, Glu, Gly, His, Ile, Lys, Leu, Met, Asn, Pro, Gln, Arg, Ser, Thr, Val or Tyr
  MOD_RES (11)...(11): Xaa = Ala, Asp, Glu, Phe, Gly, His, Lys, Leu, Asn, Gln, Arg, Ser, Thr or Tyr
  MOD_RES (12)...(12): Xaa = Ala, Phe, Gly, His, Gln, Ser, Thr or Val
  MOD_RES (13)...(13): Xaa = Ala, Asp, Glu, Phe, His, Ile, Lys, Leu, Met, Asn, Gln, Arg, Ser, Thr or Val
  MOD_RES (15)...(15): Xaa = Ala, Asp, Phe, His, Ile, Lys, Leu, Met, Asn, Gln, Arg, Ser, Thr, Val or Tyr
  MOD_RES (16)...(16): Xaa = Ala, Asp, Glu, Phe, His, Leu, Met, Asn, Pro, Gln, Arg, Ser, Val or Tyr
  MOD_RES (17)...(17): Xaa = Ala, Asp, Glu, Phe, Gly, His, Leu, Asn, Arg, Ser, Thr, Val or Tyr
  MOD_RES (18)...(18): Xaa = Ala, Asp, Glu, Gly, Asn, Pro, Gln, Arg, Ser or Thr
  MOD_RES (19)...(19): Xaa = Ala, Asp, Glu, Phe, Gly, Lys, Leu, Asn, Pro, Gln, Arg, Ser or Thr
  MOD_RES (20)...(20): Xaa = Ala, Asp, Glu, Gly, Met, Asn, Arg, Ser, Thr, Val or Tyr
  MOD_RES (21)...(21): Xaa = Ala, Asp, Glu, Gly, Lys, Leu, Met, Gln, Arg, Ser or Thr
  MOD_RES (22)...(22): Xaa = Phe, His, Ile, Pro, Arg, Val, Trp or Tyr
  MOD_RES (23)...(23): Xaa = Ala, Glu, His, Lys, Leu, Gln, Ser, Thr, Val or Tyr
  MOD_RES (25)...(25): Xaa = Ala, Asp, Glu, Phe, Gly, His, Ile, Lys, Leu, Met, Asn, Pro, Gln, Arg, Ser, Thr, Val, Trp or Tyr
  MOD_RES (27)...(27): Xaa = Ala, Asp, Glu, Phe, His, Lys, Leu, Met, Asn, Pro, Gln, Arg, Ser, Thr, Val, Trp or Tyr
  MOD_RES (28)...(28): Xaa = Ala, Asp, Glu, Phe, Gly, His, Lys, Leu, Asn, Pro, Gln, Arg, Ser, Thr, Val or Tyr
  MOD_RES (29)...(29): Xaa = Ala, Glu, Gly, His, Lys, Leu, Asn, Pro, Arg, Ser, Thr or Tyr
  MOD_RES (30)...(30): Xaa = Phe, His, Ile, Leu, Met, Arg, Thr, Trp or Tyr
  MOD_RES (31)...(31): Xaa = Ala, Asp, Glu, Phe, Gly, His, Ile, Lys, Leu, Met, Asn, Gln, Arg, Ser, Thr, Val or Tyr
  MOD_RES (32)...(32): Xaa = Asp, Gly or Ser
  MOD_RES (33)...(33): Xaa = Ala, Asp, Glu, Phe, His, Ile, Lys, Leu, Asn, Pro, Gln, Arg, Ser, Thr, Val or Tyr
  MOD_RES (34)...(34): Xaa = Ala, Asp, Glu, Phe, His, Ile, Lys, Leu, Met, Asn, Gln, Arg, Ser, Thr or Tyr
CXXXXXXCXXXXXCXXXXXXXXXCXCXXXXXXXXC

SEQ ID NO: 319 - protein, 36 aa, Artificial Sequence
  EGF domain monomer sequence
  MOD_RES (2)...(2): Xaa = Ala, Asp, Glu, Phe, Gly, Ile, Lys, Leu, Met, Asn, Pro, Gln, Arg, Ser, Thr, Val or Tyr
  MOD_RES (3)...(3): Xaa = Ala, Asp, Glu, Phe, Gly, His, Ile, Lys, Leu, Met, Asn, Pro, Gln, Arg, Ser, Thr, Val or Tyr
  MOD_RES (4)...(4): Xaa = Ala, Asp, Glu, Phe, Gly, His, Ile, Lys, Leu, Met, Asn, Pro, Gln, Arg, Ser, Thr, Val or Trp
  MOD_RES (5)...(5): Xaa = Ala, Asp, Glu, Phe, Gly, His, Ile, Lys, Leu, Met, Asn, Pro, Gln, Arg, Ser, Thr or Val
  MOD_RES (6)...(6): Xaa = Ala, Asp, Glu, Phe, Gly, His, Ile, Lys, Leu, Asn, Pro, Gln, Arg, Ser, Val or Tyr
  MOD_RES (7)...(7): Xaa = Ala, Asp, Glu, Gly, Ile, Lys, Leu, Met, Asn, Pro, Gln, Arg, Ser, Thr, Val or Tyr
  MOD_RES (9)...(9): Xaa = Ala, Cys, Asp, Glu, Phe, Gly, His, Lys, Leu, Met, Asn, Pro, Gln, Arg, Ser, Val or Tyr
  MOD_RES (10)...(10): Xaa = Ala, Asp, Glu, Gly, His, Ile, Lys, Leu, Met, Asn, Pro, Gln, Arg, Ser, Thr, Val or Tyr
  MOD_RES (11)...(11): Xaa = Ala, Asp, Glu, Phe, Gly, His, Lys, Leu, Asn, Gln, Arg, Ser, Thr or Tyr
  MOD_RES (12)...(12): Xaa = Ala, Phe, Gly, His, Gln, Ser, Thr or Val
  MOD_RES (13)...(13): Xaa = Ala, Asp, Glu, Phe, His, Ile, Lys, Leu, Met, Asn, Gln, Arg, Ser, Thr or Val
  MOD_RES (15)...(15): Xaa = Ala, Asp, Phe, His, Ile, Lys, Leu, Met, Asn, Gln, Arg, Ser, Thr, Val or Tyr
  MOD_RES (16)...(16): Xaa = Ala, Asp, Glu, Phe, His, Leu, Met, Asn, Pro, Gln, Arg, Ser, Val or Tyr
  MOD_RES (17)...(17): Xaa = Ala, Asp, Glu, Phe, Gly, His, Leu, Asn, Arg, Ser, Thr, Val or Tyr
  MOD_RES (18)...(18): Xaa = Ala, Asp, Glu, Gly, Asn, Pro, Gln, Arg, Ser or Thr
  MOD_RES (19)...(19): Xaa = Ala, Asp, Glu, Phe, Gly, Lys, Leu, Asn, Pro, Gln, Arg, Ser or Thr
  MOD_RES (20)...(20): Xaa = Ala, Asp, Glu, Gly, Met, Asn, Arg, Ser, Thr, Val or Tyr
  MOD_RES (21)...(21): Xaa = Ala, Asp, Glu, Gly, Lys, Leu, Met, Gln, Arg, Ser or Thr
  MOD_RES (22)...(22): Xaa = Phe, His, Ile, Pro, Arg, Val, Trp or Tyr
  MOD_RES (23)...(23): Xaa = Ala, Glu, His, Lys, Leu, Gln, Ser, Thr, Val or Tyr
  MOD_RES (25)...(25): Xaa = Ala, Asp, Glu, Phe, Gly, His, Ile, Lys, Leu, Met, Asn, Pro, Gln, Arg, Ser, Thr, Val, Trp or Tyr
  MOD_RES (27)...(27): Xaa = Ala, Asp, Glu, Phe, Gly, His, Ile, Lys, Leu, Asn, Pro, Gln, Arg, Ser, Thr, Val or Tyr
  MOD_RES (28)...(28): Xaa = Ala, Asp, Glu, Phe, His, Ile, Lys, Leu, Met, Asn, Pro, Gln, Arg, Ser, Thr or Val
  MOD_RES (29)...(29): Xaa = Asp, Glu, Gly, Asn, Pro or Ser
  MOD_RES (30)...(30): Xaa = Ala, Asp, Glu, Phe, His, Leu, Met, Gln, Arg, Ser, Thr, Trp or Tyr
  MOD_RES (31)...(31): Xaa = Ala, Asp, Glu, Phe, Gly, His, Ile, Lys, Leu, Met, Asn, Gln, Arg, Ser, Thr, Val or Tyr
  MOD_RES (32)...(32): Xaa = Ala, Phe, Gly, Ile, Lys, Leu, Met, Pro, Gln, Arg, Ser, Thr, Val, Trp or Tyr
  MOD_RES (33)...(33): Xaa = Ala, Asp, Glu, Phe, Gly, His, Lys, Leu, Met, Asn, Pro, Gln, Arg, Ser, Thr, Val or Trp
  MOD_RES (34)...(34): Xaa = Ala, Asp, Glu, Gly, Ile, Lys, Leu, Met, Asn, Pro, Gln, Arg, Ser, Thr, Val or Tyr
  MOD_RES (35)...(35): Xaa = Ala, Asp, Glu, Phe, Gly, His, Ile, Lys, Leu, Met, Asn, Gln, Ser, Thr or Val
CXXXXXXCXXXXXCXXXXXXXXXCXCXXXXXXXXXC

SEQ ID NO: 320 - protein, 37 aa, Artificial Sequence
  EGF domain monomer sequence
  MOD_RES (2)...(2): Xaa = Ala, Asp, Glu, Phe, Gly, Ile, Lys, Leu, Met, Asn, Pro, Gln, Arg, Ser, Thr, Val or Tyr
  MOD_RES (3)...(3): Xaa = Ala, Asp, Glu, Phe, Gly, His, Ile, Lys, Leu, Met, Asn, Pro, Gln, Arg, Ser, Thr, Val or Tyr
  MOD_RES (4)...(4): Xaa = Ala, Asp, Glu, Phe, Gly, His, Ile, Lys, Leu, Met, Asn, Pro, Gln, Arg, Ser, Thr, Val or Trp
  MOD_RES (5)...(5): Xaa = Ala, Asp, Glu, Phe, Gly, His, Ile, Lys, Leu, Met, Asn, Pro, Gln, Arg, Ser, Thr or Val
  MOD_RES (6)...(6): Xaa = Ala, Asp, Glu, Phe, Gly, His, Ile, Lys, Leu, Asn, Pro, Gln, Arg, Ser, Val or Tyr
  MOD_RES (7)...(7): Xaa = Ala, Asp, Glu, Gly, Ile, Lys, Leu, Met, Asn, Pro, Gln, Arg, Ser, Thr, Val or Tyr
  MOD_RES (9)...(9): Xaa = Ala, Cys, Asp, Glu, Phe, Gly, His, Lys, Leu, Met, Asn, Pro, Gln, Arg, Ser, Val or Tyr
  MOD_RES (10)...(10): Xaa = Ala, Asp, Glu, Gly, His, Ile, Lys, Leu, Met, Asn, Pro, Gln, Arg, Ser, Thr, Val or Tyr
  MOD_RES (11)...(11): Xaa = Ala, Asp, Glu, Phe, Gly, His, Lys, Leu, Asn, Gln, Arg, Ser, Thr or Tyr
  MOD_RES (12)...(12): Xaa = Ala, Phe, Gly, His, Gln, Ser, Thr or Val
  MOD_RES (13)...(13): Xaa = Ala, Asp, Glu, Phe, His, Ile, Lys, Leu, Met, Asn, Gln, Arg, Ser, Thr or Val
  MOD_RES (15)...(15): Xaa = Ala, Asp, Phe, His, Ile, Lys, Leu, Met, Asn, Gln, Arg, Ser, Thr, Val or Tyr
  MOD_RES (16)...(16): Xaa = Ala, Asp, Glu, Phe, His, Leu, Met, Asn, Pro, Gln, Arg, Ser, Val or Tyr
  MOD_RES (17)...(17): Xaa = Ala, Asp, Glu, Phe, Gly, His, Leu, Asn, Arg, Ser, Thr, Val or Tyr
  MOD_RES (18)...(18): Xaa = Ala, Asp, Glu, Gly, Asn, Pro, Gln, Arg, Ser or Thr
  MOD_RES (19)...(19): Xaa = Ala, Asp, Glu, Phe, Gly, Lys, Leu, Asn, Pro, Gln, Arg, Ser or Thr
  MOD_RES (20)...(20): Xaa = Ala, Asp, Glu, Gly, Met, Asn, Arg, Ser, Thr, Val or Tyr
  MOD_RES (21)...(21): Xaa = Ala, Asp, Glu, Gly, Lys, Leu, Met, Gln, Arg, Ser or Thr
  MOD_RES (22)...(22): Xaa = Phe, His, Ile, Pro, Arg, Val, Trp or Tyr
  MOD_RES (23)...(23): Xaa = Ala, Glu, His, Lys, Leu, Gln, Ser, Thr, Val or Tyr
  MOD_RES (25)...(25): Xaa = Ala, Asp, Glu, Phe, Gly, His, Ile, Lys, Leu, Met, Asn, Pro, Gln, Arg, Ser, Thr, Val, Trp or Tyr
  MOD_RES (27)...(27): Xaa = Ala, Asp, Glu, Phe, Gly, His, Ile, Lys, Leu, Asn, Pro, Gln, Arg, Ser, Thr, Val or Tyr
  MOD_RES (28)...(28): Xaa = Ala, Asp, Glu, Phe, His, Ile, Lys, Leu, Met, Asn, Pro, Gln, Arg, Ser, Thr or Val
  MOD_RES (29)...(29): Xaa = Asp, Glu, Gly, Asn, Pro or Ser
  MOD_RES (30)...(30): Xaa = Ala, Asp, Glu, Phe, His, Leu, Met, Gln, Arg, Ser, Thr, Trp or Tyr
  MOD_RES (31)...(31): Xaa = Ala, Asp, Glu, Phe, Gly, His, Ile, Lys, Leu, Met, Asn, Gln, Arg, Ser, Thr, Val or Tyr
  MOD_RES (32)...(32): Xaa = Ala, Phe, Gly, Ile, Lys, Leu, Met, Pro, Gln, Arg, Ser, Thr, Val, Trp or Tyr
  MOD_RES (33)...(33): Xaa = Ala, Asp, Glu, Phe, Gly, His, Lys, Leu, Met, Asn, Pro, Gln, Arg, Ser, Thr, Val or Trp
  MOD_RES (34)...(34): Xaa = Ala, Asp, Glu, Gly, Ile, Lys, Leu, Met, Asn, Pro, Gln, Arg, Ser, Thr, Val or Tyr
  MOD_RES (35)...(35): Xaa = Ala, Asp, Glu, Phe, Gly, His, Ile, Lys, Leu, Met, Asn, Gln, Ser, Thr or Val
  MOD_RES (36)...(36): Xaa = Glu, Phe, Gly, His, Ile, Lys, Leu, Met, Asn, Pro, Gln, Arg, Ser, Thr or Trp
CXXXXXXCXXXXXCXXXXXXXXXCXCXXXXXXXXXXC

SEQ ID NO: 321 - protein, 38 aa, Artificial Sequence
  EGF domain monomer sequence
  MOD_RES (2)...(2): Xaa = Ala, Asp, Glu, Phe, Gly, Ile, Lys, Leu, Met, Asn, Pro, Gln, Arg, Ser, Thr, Val or Tyr
  MOD_RES (3)...(3): Xaa = Ala, Asp, Glu, Phe, Gly, His, Ile, Lys, Leu, Met, Asn, Pro, Gln, Arg, Ser, Thr, Val or Tyr
  MOD_RES (4)...(4): Xaa = Ala, Asp, Glu, Phe, Gly, His, Ile, Lys, Leu, Met, Asn, Pro, Gln, Arg, Ser, Thr, Val or Trp
  MOD_RES (5)...(5): Xaa = Ala, Asp, Glu, Phe, Gly, His, Ile, Lys, Leu, Met, Asn, Pro, Gln, Arg, Ser, Thr or Val
  MOD_RES (6)...(6): Xaa = Ala, Asp, Glu, Phe, Gly, His, Ile, Lys, Leu, Asn, Pro, Gln, Arg, Ser, Val or Tyr
  MOD_RES (7)...(7): Xaa = Ala, Asp, Glu, Gly, Ile, Lys, Leu, Met, Asn, Pro, Gln, Arg, Ser, Thr, Val or Tyr
  MOD_RES (9)...(9): Xaa = Ala, Cys, Asp, Glu, Phe, Gly, His, Lys, Leu, Met, Asn, Pro, Gln, Arg, Ser, Val or Tyr
  MOD_RES (10)...(10): Xaa = Ala, Asp, Glu, Gly, His, Ile, Lys, Leu, Met, Asn, Pro, Gln, Arg, Ser, Thr, Val or Tyr
  MOD_RES (11)...(11): Xaa = Ala, Asp, Glu, Phe, Gly, His, Lys, Leu, Asn, Gln, Arg, Ser, Thr or Tyr
  MOD_RES (12)...(12): Xaa = Ala, Phe, Gly, His, Gln, Ser, Thr or Val
  MOD_RES (13)...(13): Xaa = Ala, Asp, Glu, Phe, His, Ile, Lys, Leu, Met, Asn, Gln, Arg, Ser, Thr or Val
  MOD_RES (15)...(15): Xaa = Ala, Asp, Phe, His, Ile, Lys, Leu, Met, Asn, Gln, Arg, Ser, Thr, Val or Tyr
  MOD_RES (16)...(16): Xaa = Ala, Asp, Glu, Phe, His, Leu, Met, Asn, Pro, Gln, Arg, Ser, Val or Tyr
  MOD_RES (17)...(17): Xaa = Ala, Asp, Glu, Phe, Gly, His, Leu, Asn, Arg, Ser, Thr, Val or Tyr
  MOD_RES (18)...(18): Xaa = Ala, Asp, Glu, Gly, Asn, Pro, Gln, Arg, Ser or Thr
  MOD_RES (19)...(19): Xaa = Ala, Asp, Glu, Phe, Gly, Lys, Leu, Asn, Pro, Gln, Arg, Ser or Thr
  MOD_RES (20)...(20): Xaa = Ala, Asp, Glu, Gly, Met, Asn, Arg, Ser, Thr, Val or Tyr
  MOD_RES (21)...(21): Xaa = Ala, Asp, Glu, Gly, Lys, Leu, Met, Gln, Arg, Ser or Thr
  MOD_RES (22)...(22): Xaa = Phe, His, Ile, Pro, Arg, Val, Trp or Tyr
  MOD_RES (23)...(23): Xaa = Ala, Glu, His, Lys, Leu, Gln, Ser, Thr, Val or Tyr
  MOD_RES (25)...(25): Xaa = Ala, Asp, Glu, Phe, Gly, His, Ile, Lys, Leu, Met, Asn, Pro, Gln, Arg, Ser, Thr, Val, Trp or Tyr
  MOD_RES (27)...(27): Xaa = Ala, Asp, Glu, Phe, Gly, His, Ile, Lys, Leu, Asn, Pro, Gln, Arg, Ser, Thr, Val or Tyr
  MOD_RES (28)...(28): Xaa = Ala, Asp, Glu, Phe, His, Ile, Lys, Leu, Met, Asn, Pro, Gln, Arg, Ser, Thr or Val
  MOD_RES (29)...(29): Xaa = Asp, Glu, Gly, Asn, Pro or Ser
  MOD_RES (30)...(30): Xaa = Ala, Asp, Glu, Phe, His, Leu, Met, Gln, Arg, Ser, Thr, Trp or Tyr
  MOD_RES (31)...(31): Xaa = Ala, Asp, Glu, Phe, Gly, His, Ile, Lys, Leu, Met, Asn, Gln, Arg, Ser, Thr, Val or Tyr
  MOD_RES (32)...(32): Xaa = Ala, Phe, Gly, Ile, Lys, Leu, Met, Pro, Gln, Arg, Ser, Thr, Val, Trp or Tyr
  MOD_RES (33)...(33): Xaa = Ala, Asp, Glu, Phe, Gly, His, Lys, Leu, Met, Asn, Pro, Gln, Arg, Ser, Thr, Val or Trp
  MOD_RES (34)...(34): Xaa = Ala, Asp, Glu, Gly, Ile, Lys, Leu, Met, Asn, Pro, Gln, Arg, Ser, Thr, Val or Tyr
  MOD_RES (35)...(35): Xaa = Ala, Asp, Glu, Phe, Gly, His, Ile, Lys, Leu, Met, Asn, Gln, Ser, Thr or Val
  MOD_RES (36)...(36): Xaa = Glu, Phe, Gly, His, Ile, Lys, Leu, Met, Asn, Pro, Gln, Arg, Ser, Thr or Trp
  MOD_RES (37)...(37): Xaa = Ala, Asp, Glu, Phe, Gly, His, Lys, Leu, Met, Asn, Pro, Gln, Arg, Ser, Thr, Val or Tyr
CXXXXXXCXXXXXCXXXXXXXXXCXCXXXXXXXXXXXC

SEQ ID NO: 322 - protein, 39 aa, Artificial Sequence
  EGF domain monomer sequence
  MOD_RES (2)...(2): Xaa = Ala, Asp, Glu, Phe, Gly, Ile, Lys, Leu, Met, Asn, Pro, Gln, Arg, Ser, Thr, Val or Tyr
  MOD_RES (3)...(3): Xaa = Ala, Asp, Glu, Phe, Gly, His, Ile, Lys, Leu, Met, Asn, Pro, Gln, Arg, Ser, Thr, Val or Tyr
  MOD_RES (4)...(4): Xaa = Ala, Asp, Glu, Phe, Gly, His, Ile, Lys, Leu, Met, Asn, Pro, Gln, Arg, Ser, Thr, Val or Trp
  MOD_RES (5)...(5): Xaa = Ala, Asp, Glu, Phe, Gly, His, Ile, Lys, Leu, Met, Asn, Pro, Gln, Arg, Ser, Thr or Val
  MOD_RES (6)...(6): Xaa = Ala, Asp, Glu, Phe, Gly, His, Ile, Lys, Leu, Asn, Pro, Gln, Arg, Ser, Val or Tyr
  MOD_RES (7)...(7): Xaa = Ala, Asp, Glu, Gly, Ile, Lys, Leu, Met, Asn, Pro, Gln, Arg, Ser, Thr, Val or Tyr
  MOD_RES (9)...(9): Xaa = Ala, Cys, Asp, Glu, Phe, Gly, His, Lys, Leu, Met, Asn, Pro, Gln, Arg, Ser, Val or Tyr
  MOD_RES (10)...(10): Xaa = Ala, Asp, Glu, Gly, His, Ile, Lys, Leu, Met, Asn, Pro, Gln, Arg, Ser, Thr, Val or Tyr
  MOD_RES (11)...(11): Xaa = Ala, Asp, Glu, Phe, Gly, His, Lys, Leu, Asn, Gln, Arg, Ser, Thr or Tyr
  MOD_RES (12)...(12): Xaa = Ala, Phe, Gly, His, Gln, Ser, Thr or Val
  MOD_RES (13)...(13): Xaa = Ala, Asp, Glu, Phe, His, Ile, Lys, Leu, Met, Asn, Gln, Arg, Ser, Thr or Val
  MOD_RES (15)...(15): Xaa = Ala, Asp, Phe, His, Ile, Lys, Leu, Met, Asn, Gln, Arg, Ser, Thr, Val or Tyr
  MOD_RES (16)...(16): Xaa = Ala, Asp, Glu, Phe, His, Leu, Met, Asn, Pro, Gln, Arg, Ser, Val or Tyr
  MOD_RES (17)...(17): Xaa = Ala, Asp, Glu, Phe, Gly, His, Leu, Asn, Arg, Ser, Thr, Val or Tyr
  MOD_RES (18)...(18): Xaa = Ala, Asp, Glu, Gly, Asn, Pro, Gln, Arg, Ser or Thr
  MOD_RES (19)...(19): Xaa = Ala, Asp, Glu, Phe, Gly, Lys, Leu, Asn, Pro, Gln, Arg, Ser or Thr
  MOD_RES (20)...(20): Xaa = Ala, Asp, Glu, Gly, Met, Asn, Arg, Ser, Thr, Val or Tyr
  MOD_RES (21)...(21): Xaa = Ala, Asp, Glu, Gly, Lys, Leu, Met, Gln, Arg, Ser or Thr
  MOD_RES (22)...(22): Xaa = Phe, His, Ile, Pro, Arg, Val, Trp or Tyr
  MOD_RES (23)...(23): Xaa = Ala, Glu, His, Lys, Leu, Gln, Ser, Thr, Val or Tyr
  MOD_RES (25)...(25): Xaa = Ala, Asp, Glu, Phe, Gly, His, Ile, Lys, Leu, Met, Asn, Pro, Gln, Arg, Ser, Thr, Val, Trp or Tyr
  MOD_RES (27)...(27): Xaa = Ala, Asp, Glu, Phe, Gly, His, Ile, Lys, Leu, Asn, Pro, Gln, Arg, Ser, Thr, Val or Tyr
  MOD_RES (28)...(28): Xaa = Ala, Asp, Glu, Phe, His, Ile, Lys, Leu, Met, Asn, Pro, Gln, Arg, Ser, Thr or Val
  MOD_RES (29)...(29): Xaa = Asp, Glu, Gly, Asn, Pro or Ser
  MOD_RES (30)...(30): Xaa = Ala, Asp, Glu, Phe, His, Leu, Met, Gln, Arg, Ser, Thr, Trp or Tyr
  MOD_RES (31)...(31): Xaa = Ala, Asp, Glu, Phe, Gly, His, Ile, Lys, Leu, Met, Asn, Gln, Arg, Ser, Thr, Val or Tyr
  MOD_RES (32)...(32): Xaa = Ala, Phe, Gly, Ile, Lys, Leu, Met, Pro, Gln, Arg, Ser, Thr, Val, Trp or Tyr
  MOD_RES (33)...(33): Xaa = Ala, Asp, Glu, Phe, Gly, His, Lys, Leu, Met, Asn, Pro, Gln, Arg, Ser, Thr, Val or Trp
  MOD_RES (34)...(34): Xaa = Ala, Asp, Glu, Gly, Ile, Lys, Leu, Met, Asn, Pro, Gln, Arg, Ser, Thr, Val or Tyr
  MOD_RES (35)...(35): Xaa = Ala, Asp, Glu, Phe, Gly, His, Ile, Lys, Leu, Met, Asn, Gln, Ser, Thr or Val
  MOD_RES (36)...(36): Xaa = Glu, Phe, Gly, His, Ile, Lys, Leu, Met, Asn, Pro, Gln, Arg, Ser, Thr or Trp
  MOD_RES (37)...(37): Xaa = Ala, Asp, Glu, Phe, Gly, His, Lys, Leu, Met, Asn, Pro, Gln, Arg, Ser, Thr, Val or Tyr
  MOD_RES (38)...(38): Xaa = Ala, Asp, Glu, Phe, Gly, His, Ile, Lys, Met, Asn, Gln, Arg, Ser, Thr, Val or Tyr
CXXXXXXCXXXXXCXXXXXXXXXCXCXXXXXXXXXXXXC

SEQ ID NO: 323 - protein, 6 aa, Artificial Sequence
  affinity peptide
SKVILF

SEQ ID NO: 324 - protein, 35 aa, Artificial Sequence
  LDL-receptor A domain consensus
  MOD_RES (1)...(35): Xaa = any amino acid
  DISULFID (1)...(13)
  DISULFID (8)...(26)
  DISULFID (20)...(35)
CXXXXFXCXXGXCIXXXXXCDGXXDCXDXSDEXXC

SEQ ID NO: 325 - protein, 35 aa, Artificial Sequence
  conserved amino acids in an A-domain
  MOD_RES (2)...(5): Xaa = any amino acid
  MOD_RES (6)...(6): Xaa = hydrophobic amino acid
  MOD_RES (7)...(7): Xaa = any amino acid
  MOD_RES (9)...(12): Xaa = any amino acid
  MOD_RES (14)...(14): Xaa = hydrophobic amino acid
  MOD_RES (15)...(17): Xaa = any amino acid
  MOD_RES (18)...(18): Xaa = hydrophobic amino acid
  MOD_RES (19)...(19): Xaa = any amino acid
  MOD_RES (21)...(21): Xaa = negatively charged amino acid
  MOD_RES (22)...(24): Xaa = any amino acid
  MOD_RES (25)...(25): Xaa = negatively charged amino acid
  MOD_RES (27)...(30): Xaa = any amino acid
  MOD_RES (31)...(32): Xaa = negatively charged amino acid
  MOD_RES (33)...(34): Xaa = any amino acid
  DISULFID (1)...(13)
  DISULFID (8)...(26)
  DISULFID (20)...(35)
CXXXXXXCXXXXCXXXXXXCXXXXXCXXXXXXXXC

SEQ ID NO: 326 - protein, 41 aa, Artificial Sequence
  A domain
  MOD_RES (2)...(2): Xaa = Val, Leu, Gly, Pro, Ala, Glu, Gln or Arg
  MOD_RES (3)...(3): Xaa = Ala, Pro or Ser
  MOD_RES (4)...(4): Xaa = Asp, Asn, Gly or Ser
  MOD_RES (7)...(7): Xaa = Thr, Pro, Arg, Lys or Gln
  MOD_RES (9)...(9): Xaa = Gly, Ser, Asp, Glu, Asn, Lys or Arg
  MOD_RES (10)...(10): Xaa = Asn or Ser
  MOD_RES (12)...(12): Xaa = His, Gln or Arg
  MOD_RES (15)...(15): Xaa = Pro or Ser
  MOD_RES (16)...(16): Xaa = Val, Leu, Gly, Pro, Ala, Glu, Gln or Arg
  MOD_RES (17)...(17): Xaa = Ala, Ser, Glu, Asn, His or Arg
  MOD_RES (18)...(18): Xaa = Leu or Trp
  MOD_RES (19)...(19): Xaa = Leu, Val, Gly or Arg
  MOD_RES (23)...(23): Xaa = Val, Asp or Glu
  MOD_RES (24)...(24): Xaa = Pro, Asn or Asp
  MOD_RES (27)...(27): Xaa = Ala, Pro, Gly, Glu, Gln or Arg
  MOD_RES (29)...(29): Xaa = Asn or Gly
  MOD_RES (33)...(33): Xaa = Leu, Val, Met, Glu, Gln or Lys
  MOD_RES (34)...(34): Xaa = Gly, Ser, Asn or Asp
  MOD_RES (36)...(36): Xaa = Ala, Pro, Thr, Gln, Glu or Lys
  MOD_RES (37)...(38): Xaa = Ala, Asp, Glu, Gly, His, Ile, Lys, Leu, Asn, Pro, Gln, Arg, Ser, Thr or Val
  MOD_RES (39)...(39): Xaa = Ser, Gly or Arg
  MOD_RES (40)...(40): Xaa = His, Pro or Arg
CXXXZFXCXXGXCIXXXXXCDGXXDCXDXSDEXXCXXXXXT

SEQ ID NO: 327 - protein, 35 aa, Artificial Sequence; identical to SEQ ID NO: 325
  A domain
  MOD_RES (1)...(35): Xaa = any amino acid

SEQ ID NO: 328 - protein, 35 aa, Artificial Sequence
  DA4/1 selected clone 1
CRADQFKCENGQCIPARLRCDGDPDCPDNSDELNC

SEQ ID NO: 329 - protein, 35 aa, Artificial Sequence
  DH3/2 selected clone 2
CLADQFTCKNGHCIPRAWLCDGVGDCPDDSDEVGC

SEQ ID NO: 330 - protein, 27 aa, Artificial Sequence
  A domain typical consensus sequence representing portion beginning at third Cys
  MOD_RES (2)...(2): Xaa = Val, Ile, Leu, Met or Ala
  MOD_RES (3)...(7): Xaa = any amino acid
  MOD_RES (9)...(9): Xaa = Asp, Asn or His
  MOD_RES (10)...(12): Xaa = any amino acid
  MOD_RES (13)...(13): Xaa = Asp, Glu, Asn, Gln, His or Thr
  MOD_RES (15)...(18): Xaa = any amino acid, Xaa at position 18 may be present or absent
  MOD_RES (19)...(19): Xaa = Ser, Thr, Ala, Asp or Glu
  MOD_RES (20)...(20): Xaa = Asp, Glu or His
  MOD_RES (21)...(21): Xaa = Asp or Glu
  MOD_RES (22)...(26): Xaa = any amino acid, Xaa at positions 23-26 may be present or absent
CXXXXXXCXXXXXCXXXXXXXXXXXXC

SEQ ID NO: 331 - protein, 64 aa, Artificial Sequence; identical to SEQ ID NO: 219
  A domain second consensus sequence spanning all six Cys residues
  MOD_RES (2)...(16): Xaa = any amino acid, Xaa at positions 4-16 may be present or absent
  MOD_RES (18)...(32): Xaa = any amino acid, Xaa at positions 22-32 may be present or absent
  MOD_RES (34)...(40): Xaa = any amino acid, Xaa at position 40 may be present or absent
  MOD_RES (43)...(45): Xaa = any amino acid, Xaa at position 18 may be present or absent
  MOD_RES (46)...(46): Xaa = Asp, Glu, Asn, Gln, His, Ser or Thr
  MOD_RES (48)...(53): Xaa = any amino acid, Xaa at positions 52 and 53 may be present or absent
  MOD_RES (56)...(63): Xaa = any amino acid, Xaa at positions 58-63 may be present or absent

SEQ ID NO: 332 - protein, 123 aa, Artificial Sequence
  exemplary C2 domain
YSHKFTVVVLRATKVTKGAFGDMLDTPDPYVELFISTTPDSRKRTRHFNNDINPVWNETFEFILDPNQENVLEITLMDANYVMDETLGTATFTVSSMKVGEKKEVPFIFNQVTEMVLEMSLEV

SEQ ID NO: 333 - protein, 5 aa, Artificial Sequence
  peptide linker repeat
GGGGS

SEQ ID NO: 334 - protein, 15 aa, Artificial Sequence
  15mer peptide linker
GGGGSGGGGSGGGGS

SEQ ID NO: 335 - protein, 5 aa, Artificial Sequence
  simple linker repeated an unspecified number of times
GGGGS

SEQ ID NO: 336 - protein, 25 aa, Artificial Sequence
  flexible peptide linker, 1-25 Gly residues
  MOD_RES (2)...(25): Gly at positions 2-25 may be present or absent
GGGGGGGGGGGGGGGGGGGGGGGGG

SEQ ID NO: 337 - protein, 20 aa, Artificial Sequence
  flexible peptide linker, 5-20 Gly residues
  MOD_RES (6)...(20): Gly at positions 6-20 may be present or absent
GGGGGGGGGGGGGGGGGGGG

SEQ ID NO: 338 - protein, 15 aa, Artificial Sequence
  flexible peptide linker, 5-15 Gly residues
  MOD_RES (6)...(15): Gly at positions 6-15 may be present or absent
GGGGGGGGGGGGGGG

SEQ ID NO: 339 - protein, 12 aa, Artificial Sequence
  flexible peptide linker, 8-12 Gly residues
  MOD_RES (9)...(12): Gly at positions 9-12 may be present or absent
GGGGGGGGGGGG

SEQ ID NO: 340 - protein, 17 aa, Artificial Sequence
  specific peptide linker
  MOD_RES (2)...(5): Gly at positions 2-5 may be present or absent
  MOD_RES (6)...(6): Xaa = Ala, Val, Leu, Ile, Met, Phe, Trp, Pro, Gly, Ser, Thr, Cys, Tyr, Asn, Gln, Lys, Arg, His, Asp or Glu
  MOD_RES (8)...(11): Gly at positions 8-11 may be present or absent
  MOD_RES (12)...(12): Xaa = Ala, Val, Leu, Ile, Met, Phe, Trp, Pro, Gly, Ser, Thr, Cys, Tyr, Asn, Gln, Lys, Arg, His, Asp or Glu
  MOD_RES (14)...(17): Gly at positions 8-11 may be present or absent
GGGGGXGGGGGXGGGGG

SEQ ID NO: 341 - protein, 17 aa, Artificial Sequence
  specific peptide linker
  MOD_RES (2)...(5): Gly at positions 2-5 may be present or absent
  MOD_RES (6)...(6): Xaa = Ser, Ala or Thr
  MOD_RES (8)...(11): Gly at positions 8-11 may be present or absent
  MOD_RES (12)...(12): Xaa = Ser, Ala or Thr
  MOD_RES (14)...(17): Gly at positions 8-11 may be present or absent
GGGGGXGGGGGXGGGGG

SEQ ID NO: 342 - protein, 17 aa, Artificial Sequence
  specific peptide linker
  MOD_RES (2)...(5): Gly at positions 2-5 may be present or absent
  MOD_RES (8)...(11): Gly at positions 8-11 may be present or absent
  MOD_RES (14)...(17): Gly at positions 8-11 may be present or absent
GGGGGSGGGGGSGGGGG

SEQ ID NO: 343 - protein, 11 aa, Artificial Sequence
  peptide linker
  MOD_RES (4)...(4): Xaa = Ala, Val, Leu, Ile, Met, Phe, Trp, Pro, Gly, Ser, Thr, Cys, Tyr, Asn, Gln, Lys, Arg, His, Asp or Glu
  MOD_RES (8)...(8): Xaa = Ala, Val, Leu, Ile, Met, Phe, Trp, Pro, Gly, Ser, Thr, Cys, Tyr, Asn, Gln, Lys, Arg, His, Asp or Glu
GGGXGGGXGGG

SEQ ID NO: 344 - protein, 11 aa, Artificial Sequence
  peptide linker
  MOD_RES (4)...(4): Xaa = Ser, Ala or Thr
  MOD_RES (8)...(8): Xaa = Ser, Ala or Thr
GGGXGGGXGGG

SEQ ID NO: 345 - protein, 11 aa, Artificial Sequence
  peptide linker
GGGSGGGSGGG

SEQ ID NO: 346 - protein, 25 aa, Artificial Sequence
  specific peptide linker
  MOD_RES (2)...(12): Gly at positions 2-12 may be present or absent
  MOD_RES (15)...(25): Gly at positions 15-25 may be present or absent
GGGGGGGGGGGGCGGGGGGGGGGGG

SEQ ID NO: 347 - protein, 11 aa, Artificial Sequence
  peptide linker
GGGGGCGGGGG

SEQ ID NO: 348 - protein, 25 aa, Artificial Sequence
  specific proline-containing peptide linker
  MOD_RES (2)...(12): Pro at positions 2-12 may be present or absent
  MOD_RES (15)...(25): Pro at positions 15-25 may be present or absent
PPPPPPPPPPPPCPPPPPPPPPPPP

SEQ ID NO: 349 - protein, 11 aa, Artificial Sequence
  peptide linker
PPPPPCPPPPP

SEQ ID NO: 350 - protein, 19 aa, Artificial Sequence
  peptide linker comprising N-glycosylation site
  MOD_RES (2)...(8): Gly at positions 2-12 may be present or absent
  MOD_RES (10)...(10): Xaa = any amino acid except Pro
  MOD_RES (11)...(11): Xaa = Ser or Thr
  MOD_RES (13)...(19): Gly at positions 2-12 may be present or absent
GGGGGGGGNXXGGGGGGGG

SEQ ID NO: 351 - protein, 19 aa, Artificial Sequence
  peptide linker comprising N-glycosylation site
  MOD_RES (2)...(8): Gly at positions 2-12 may be present or absent
  MOD_RES (10)...(10): Xaa = any amino acid except Pro
  MOD_RES (13)...(19): Gly at positions 2-12 may be present or absent
GGGGGGGGNXTGGGGGGGG

SEQ ID NO: 352 - protein, 6 aa, Artificial Sequence
  A domain linker 6mer
  MOD_RES (1)...(1): Xaa = Ala, Pro, Thr, Gln, Glu or Lys
  MOD_RES (2)...(3): Xaa = any amino acid except Cys, Phe, Tyr, Trp or Met
  MOD_RES (4)...(4): Xaa = Ser, Gly or Arg
  MOD_RES (5)...(5): Xaa = His, Pro or Arg
XXXXXT

SEQ ID NO: 353 - protein, 40 aa, Artificial Sequence
  IG156 momomer domain
CLSSEFQCQSSGRCIPLAWVCDGDNDCRDDSDEKSCKPRT

SEQ ID NO: 354 - protein, 51 aa, Artificial Sequence
  RBCA monomer domain
CRSSQFQCNDSRICIPGRWRCDGDNDCQDGSDETGCGDSHILPFSTPGPST

SEQ ID NO: 355 - protein, 48 aa, Artificial Sequence
  RBCB monomer domain
CPAGEFPCKNGQCLPVTWLCDGVNDCLDGSDEKGCGRPGPGATSAPAA

SEQ ID NO: 356 - protein, 48 aa, Artificial Sequence
  RBC11 monomer domain
CPPDEFPCKNGQCIPQDWLCDGVNDCLDGSDEKDCGRPGPGATSAPAA

SEQ ID NO: 357 - protein, 41 aa, Artificial Sequence
  CSA-A8 monomer domain
CGAGQFPCKNGHCLPLNLLCDGVNDCEDNSDEPSELCKALT

SEQ ID NO: 358 - protein, 6 aa, Artificial Sequence
  6xHis
HHHHHH

SEQ ID NO: 359 - DNA, 50 bp, Artificial Sequence
  monomeric C2 domain assembly PCR oligonucleotide
acactgcaatcgcgccttacggctcccgggcggatcctcccataagttca

SEQ ID NO: 360 - DNA, 72 bp, Artificial Sequence
  monomeric C2 domain assembly PCR oligonucleotide
  modified_base (1)...(72): n = g, a, c or t
agctaccaaagtgacannknnknnknnknnknnknnknnknnknnknnknnkccatacgtcgaattgttcat

SEQ ID NO: 361 - DNA, 72 bp, Artificial Sequence
  monomeric C2 domain assembly PCR oligonucleotide
agctaccaaagtgacaaaaggtgcttttggtgatatgttggatactccagatccatacgtcgaattgttcat

SEQ ID NO: 362 - DNA, 62 bp, Artificial Sequence
  monomeric C2 domain assembly PCR oligonucleotide
  modified_base (1)...(62): n = g, a, c or t
taggaagagaacacgtcattttnnknnknnkattaaccctgtttggaacgagacctttgagt

SEQ ID NO: 363 - DNA, 62 bp, Artificial Sequence
  monomeric C2 domain assembly PCR oligonucleotide
taggaagagaacacgtcattttaataatgatattaaccctgtttggaacgagacctttgagt

SEQ ID NO: 364 - DNA, 58 bp, Artificial Sequence
  monomeric C2 domain assembly PCR oligonucleotide
  modified_base (1)...(58): n = g, a, c or t
ttggaaatcaccctaatgnnknnknnknnknnknnknnknnkactctaggtacagcaa

SEQ ID NO: 365 - DNA, 58 bp, Artificial Sequence
  monomeric C2 domain assembly PCR oligonucleotide
ttggaaatcaccctaatggatgcaaattatgttatggacgaaactctaggtacagcaa

SEQ ID NO: 366 - DNA, 60 bp, Artificial Sequence
  monomeric C2 domain assembly PCR oligonucleotide
aagaaggaagtcccatttattttcaatcaagttactgaaatggtcttagagatgtccctt

SEQ ID NO: 367 - DNA, 48 bp, Artificial Sequence
  monomeric C2 domain assembly PCR oligonucleotide
tgtcactttggtagctcttaacacaactacagtgaacttatgggagga

SEQ ID NO: 368 - DNA, 51 bp, Artificial Sequence
  monomeric C2 domain assembly PCR oligonucleotide
acgtgttctcttcctagaatctggagttgtactgatgaacaattcgacgta

SEQ ID NO: 369 - DNA, 62 bp, Artificial Sequence
  monomeric C2 domain assembly PCR oligonucleotide
attagggtgatttccaaaacattttcttgattaggatctaatataaactcaaaggtctcgtt

SEQ ID NO: 370 - DNA, 64 bp, Artificial Sequence
  monomeric C2 domain assembly PCR oligonucleotide
atgggacttccttcttttctcccactttcattgaagatacagtaaacgttgctgtacctagagt

SEQ ID NO: 371 - DNA, 67 bp, Artificial Sequence
  monomeric C2 domain assembly PCR oligonucleotide
gaccgatagcttgccgattgcagtgtggccacagaggcctcgagaacttcaagggacatctctaaga

SEQ ID NO: 372 - DNA, 56 bp, Artificial Sequence
  amplification PCR oligonucleotide
acactgcaatcgcgccttacggctcaggtgctggtggttcccataagttcactgta

SEQ ID NO: 373 - DNA, 80 bp, Artificial Sequence
  amplification PCR oligonucleotide
accgatagcttgccgattgcagtcagcacctgaaccaccaccaccagaaccaccaccaccaacttcaagggacatctcta

SEQ ID NO: 374 - DNA, 227 bp, Artificial Sequence
  stop fragment Stop1
gaattcaacgctactaccattagtagaattgatgccaccttttcagctcgcgccccaaatgaaaaaatggtcaaactaaatctactcgttcgcagaattgggaatcaactgttacatggaatgaaacttccagacaccgtactttatgaatatttatgacgattccgaggcgcgcccggactacccgtatgatgttccggattatgccccgggatcctcaggtgctg

SEQ ID NO: 375 - DNA, 173 bp, Artificial Sequence
  stop fragment Stop2
caggtgctgcactcgaggccactgcggccgcatattaacgtagatttttcctcccaacgtcctgactggtataatgagccagttcttaaaatcgcataaccagtacatggtgattaaagttgaaattaaaccgtctcaagagctttgttacgttgatttgggtaatgaagctt

SEQ ID NO: 376 - DNA, 19 bp, Artificial Sequence
  amplification PCR primer
aattcaacgctactaccat

SEQ ID NO: 377 - DNA, 21 bp, Artificial Sequence
  amplification PCR primer
agcttcattacccaaatcaac

SEQ ID NO: 378 - DNA, 81 bp, Artificial Sequence
  monomeric A domain assembly PCR oligonucleotide
cactatgcatggactcagtgtgtccgataagggcacacggtgcctacccgtatgatgttccggattatgccccgggcagta

SEQ ID NO: 379 - DNA, 84 bp, Artificial Sequence
  monomeric A domain assembly PCR oligonucleotide
  modified_base (1)...(84): n = g, a, c or t
cgccgtcgcatmscmagykcnsagraatacawyggccgytwyygcacbkaaattsgyyagvcnsacaggtactgcccggggcat

SEQ ID NO: 380 - DNA, 84 bp, Artificial Sequence
  monomeric A domain assembly PCR oligonucleotide
  modified_base (1)...(84): n = g, a, c or t
cgccgtcgcatmscmatkccnsagraatacawyggccgytwyygcacbkaaattsgyyagvcnsacaggtactgcccggggcat

SEQ ID NO: 381 - DNA, 79 bp, Artificial Sequence
  monomeric A domain assembly PCR oligonucleotide
  modified_base (1)...(79): n = g, a, c or t
atgcgacggcgwwratgattgtsvagatggtagcgatgaavwgrrttgtvmavnmvnmvgccvtacgggctcggcctct

SEQ ID NO: 382 - DNA, 79 bp, Artificial Sequence
  monomeric A domain assembly PCR oligonucleotide
  modified_base (1)...(79): n = g, a, c or t
atgcgacggcgwwccggattgtsvagatggtagcgatgaavwgrrttgtvmavnmvnmvgccvtacgggctcggcctct

SEQ ID NO: 383 - DNA, 79 bp, Artificial Sequence
  monomeric A domain assembly PCR oligonucleotide
  modified_base (1)...(79): n = g, a, c or t
atgcgacggcgwwratgattgtsvagataacagcgatgaavwgrrttgtvmavnmvnmvgccvtacgggctcggcctct

SEQ ID NO: 384 - DNA, 79 bp, Artificial Sequence
  monomeric A domain assembly PCR oligonucleotide
  modified_base (1)...(79): n = g, a, c or t
atgcgacggcgwwccggattgtsvagataacagcgatgaavwgrrttgtvmavnmvnmvgccvtacgggctcggcctct

SEQ ID NO: 385 - DNA, 81 bp, Artificial Sequence
  monomeric A domain assembly PCR oligonucleotide
tcctggtagtacttatctactactatttgtctgtgtctgctctgggttcctaacggttcggccacagaggccgagcccgta

SEQ ID NO: 386 - DNA, 17 bp, Artificial Sequence
  amplification PCR oligonucleotide
aagcctcagcgaccgaa

SEQ ID NO: 387 - DNA, 18 bp, Artificial Sequence
  amplification PCR oligonucleotide
agcccaataggaacccat

SEQ ID NO: 388 - DNA, 228 bp, Artificial Sequence
  stop fragment Stop1
gaattcaacgctactaccattagtagaattgatgccaccttttcagctcgcgccccaaatgaaaaaatggtcaaactaaatctactcgttcgcagaattgggaatcaactgttacatggaatgaaacttccagacaccgtactttatgaatatttatgacgattccgaggcgcgcccggactacccgtatgatgttccggattatgccccgggcggatccagtacctg

SEQ ID NO: 389 - DNA, 176 bp, Artificial Sequence
  stop fragment Stop2
gccctacgggcctcgaggcacctggtgcggccgcatattaacgtagatttttcctcccaacgtcctgactggtataatgagccagttcttaaaatcgcataaccagtacatggtgattaaagttgaaattaaaccgtctcaagagctttgttacgttgatttgggtaatgaagctt

SEQ ID NO: 390 - DNA, 21 bp, Artificial Sequence
  amplification PCR primer
agcttcattacccaaatcaac

SEQ ID NO: 391 - DNA, 19 bp, Artificial Sequence
  amplification PCR primer
aattcaacgctactaccat

SEQ ID NO: 392 - protein, 42 aa, Artificial Sequence
  CD20 binding sequence 2
CLPDEFQCRSTGICIPLAWRCDGVNDCQDDSDETNCRATGRT

SEQ ID NO: 393 - protein, 53 aa, Artificial Sequence
  CD20 binding sequence 3
CLPGEFRCRGTSICIPPSWVCDGVDDCGDGSDEALEHCGDSHILPFSTPGPST

SEQ ID NO: 394 - protein, 51 aa, Artificial Sequence
  CD20 binding sequence 4
CQPNEFPCGSTGLCVPREWLCDGVDDCQDGSDEPDCGDSHILPFSTPGPST

SEQ ID NO: 395 - protein, 53 aa, Artificial Sequence; identical to SEQ ID NO: 393
  CD20 binding sequence 5

SEQ ID NO: 396 - protein, 42 aa, Artificial Sequence
  CD20 binding sequence 6
CRSGEFKCHGTRPCVPQRWVCDGDDDCVDGSDEKSCETPARR

SEQ ID NO: 397 - protein, 42 aa, Artificial Sequence
  CD20 binding sequence 7
CRSSQFKCHNTRPCIPGRWVCDGVNDCLDGSDEANCRRAARR

SEQ ID NO: 398 - protein, 42 aa, Artificial Sequence
  CD20 binding sequence 8
CLPERFQCAVPGYCIPLPGVCDGVNDCQEDSDEPNCRAPGLR

SEQ ID NO: 399 - protein, 48 aa, Artificial Sequence
  CD20 binding sequence 9
CRRNEFRCKSGHCVPQPLVCDGVRDCEDNSDEPSCGRPGPGATSAPAA

SEQ ID NO: 400 - protein, 48 aa, Artificial Sequence
  CD20 binding sequence 10
CRAGEFPCKNGQCLPVTWLCDGVNDCLDGSDEKGCGRPGPGATSAPAA

SEQ ID NO: 401 - protein, 48 aa, Artificial Sequence
  CD20 binding sequence 11
CPSNEFTCKSGHCVPQPFVCDGVPDCEDNSDETSCGRPGPGATSAPAA

SEQ ID NO: 402 - protein, 49 aa, Artificial Sequence
  CD20 binding sequence 14
CRASEFPCRGTGTCIPRHWLCDGENDCADSSDEKDCGRPGPGATSAPAA

SEQ ID NO: 403 - protein, 49 aa, Artificial Sequence
  CD20 binding sequence 15
CPPDEFRCKSYKRCVPLAFVCDGVDDCEDGSDEEGCGRPGPGATSAPAA

SEQ ID NO: 404 - protein, 42 aa, Artificial Sequence; identical to SEQ ID NO: 392
  CD20 binding sequence 1

SEQ ID NO: 405 - protein, 44 aa, Artificial Sequence
  CD20 binding sequence 6
CPAGEFQCGNGQCIPATWLCDGVNDCLDNSDETGCSQDPEFHKV

SEQ ID NO: 406 - protein, 42 aa, Artificial Sequence
  CD20 binding sequence CC3
CPASQFKCHNTRTCIPRRWVCDGVNDCLDGSDEANCRRAAPT

SEQ ID NO: 407 - protein, 12 aa, Artificial Sequence
  repeated Gly-Gly-Ser linker
GGSGGSGGSGGS

SEQ ID NO: 408 - protein, 43 aa, Artificial Sequence
  TPO-R binding sequence T4690 (TPO1)
CHSTGEFRCRSSGICVSPTWVCDGENDCLDGSDEASCTAAGPT

SEQ ID NO: 409 - protein, 49 aa, Artificial Sequence
  TPO-R binding sequence T5 (TPO2)
CPPSEFRCNSGQCIPREWRCDGDNDCADNSDEESCSAPASEPPGSLSLQ

SEQ ID NO: 410 - protein, 44 aa, Artificial Sequence
  TPO-R binding sequence T2 (TPO9)
CLPSEFRCSSGHCIPRRWRCDGEPDCQDGSDEANCGTSEHTSLQ

SEQ ID NO: 411 - protein, 50 aa, Artificial Sequence
  TPO-R binding sequence T1 (TPO10)
CQSNEFQCHNYNICLPRPWVCDGVNDCPDGSDEEGCSAPASEPPGSLSLQ

SEQ ID NO: 412 - protein, 50 aa, Artificial Sequence
  IgE-binding monomer sequence IGE-1
CPANEFQCRNSSTCIPRRWLCDGDDDCGDGSDETGCSAPASEPPGSLSLQ

SEQ ID NO: 413 - protein, 89 aa, Artificial Sequence
  IgE-binding walked dimer 1, selected dimer IgE-1.1
CPANEFQCRNSSTCIPRRWLCDGDDDCGDGSDETGCSAPASEPPGSLCQPDQFRCSSGRCLSREWLCDGEDDCEDDSDETDCPTRTSLQ

SEQ ID NO: 414 - protein, 96 aa, Artificial Sequence
  IgE-binding walked dimer 2, selected dimer IgE-1.2
CPANEFQCRNSSTCIPRRWLCDGDDDCGDGSDETGCSAPASEPPGSLCLPSQFPCDSGNCLPLTWLCDGVDDCGDNSDEEDCSAPASEPPGSLSLQ

SEQ ID NO: 415 - protein, 91 aa, Artificial Sequence
  IgE-binding walked dimer 3, selected dimer IgE-1.3
CPANEFQCRNSSTCIPRRWLCDGDDDCGDGSDETGCSAPASEPPGSLCRANQFPCDNGNCLPQPWRCDGDNDCVDGSDETSCEAPAHTSLQ

SEQ ID NO: 416 - protein, 92 aa, Artificial Sequence
  IgE-binding walked dimer 4, selected dimer IgE-1.4
CPANEFQCRNSSTCIPRRWLCDGDDDCGDGSDETGCSAPASEPPGSLCAPNEFQCRDNNTCLPEDWRCDGEDDCADNSDEANCTTPGPTSLQ

SEQ ID NO: 417 - protein, 99 aa, Artificial Sequence
  IgE-binding walked dimer 5, selected dimer IgE-1.5
CPANEFQCRNSSTCIPRRWLCDGEDDCEDGSDEASDTCSAPASEPPGSLCPANEFQCRNSSTCIPRRWLCDGDDDCGDGSDETGCSAPASEPPGSLSLQ

SEQ ID NO: 418 - protein, 89 aa, Artificial Sequence
  IgE-binding walked dimer 6, selected dimer IgE-1.6
CGSGQFPCGSGHCVPLNWVCDGVDDCGDDSDETDCKAHTCPANEFQCRNSSTCIPRRWLCDGDDDCGDGSDETGCSAPASEPPGSLSLQ

SEQ ID NO: 419 - protein, 91 aa, Artificial Sequence
  IgE-binding walked dimer 7, selected dimer IgE-1.7
CPANEFQCRNSSTCIPRRWLCDGDDDCGDGSDETGCSAPASEPPGSLCGADQFPCSSGHCIPLPWVCDGEDDCADGSDEADCRGTEPTSLQ

SEQ ID NO: 420 - protein, 96 aa, Artificial Sequence
  IgE-binding walked dimer 8, selected dimer IgE-1.8
CPANEFQCRNSSTCIPRRWLCDGDDDCGDGSDETGCSAPASEPPGSLCAPSQFRCGNGRCIPRSWRCDGEDDCADDSDEENCSAPASEPPGSLSLQ

SEQ ID NO: 421 - protein, 99 aa, Artificial Sequence
  IgE-binding walked dimer 9, selected dimer IgE-1.9
RVWRRLVGSCRPNQFTCKSSETCIPAHWRCDGDDDCGDGSDEADCETRTCPANEFQCRNSSTCIPRRWLCDGDDDCGDGSDETGCSAPASEPPGSLSLQ

SEQ ID NO: 422 - protein, 90 aa, Artificial Sequence
  IgE-binding walked dimer 10, selected dimer IgE-1.10
CPANEFQCRNSSTCIPRRWLCDGDDDCGDGSDETGCSAPASEPPGSLCQSSQFPCHDYEICLPATLLCDGVDDCLDGSDETNCAKPTSLQ

SEQ ID NO: 423 - protein, 91 aa, Artificial Sequence
  IgE-binding walked dimer 12, selected dimer IgE-1.12
CPANEFQCRNSSTCIPRRWLCDGDDDCGDGSDEPGCSAPASEPPGSLCPPGEFPCGNGRSVPLTWLCDGVDDCGDNSDETGCETTGRTSLQ

SEQ ID NO: 424 - protein, 100 aa, Artificial Sequence
  IgE-binding walked dimer 13 (27), IgE-binding walked dimer 27 (13), selected dimer IgE-1.13 (27), selected dimer IgE-1.27 (13)
CGSNQFPCENGNCVPLGWGCDGVNDCQDNSDESLATCGRPGPGATSAPAACPANEFQCRNSSTCIPRRWLCDGDDDCGDGSDETGCSAPASEPPGSLSLQ

SEQ ID NO: 425 - protein, 90 aa, Artificial Sequence
  IgE-binding walked dimer 14, selected dimer IgE-1.14
CPSGQFPCDNGHCIPRRWLCDGEDDCPDGSDEAQVCQQRTCPANEFQCRNSSTCIPRRWLCDGDDDCGDGSDETGCSAPASEPPGSLSLQ

SEQ ID NO: 426 - protein, 124 aa, Artificial Sequence
  IgE-binding walked dimer 15, selected dimer IgE-1.15
CPANEFQCRNSSTCIPRRWLCDGDDDCGDGSDETGCSAPASEPPGSLSLQALLCDGVDDCRDGSDESALCEEHTCPANEFQCRNSSTCIPRRWLCDGDDDCGDGSDETGCSAPASEPPGSLSLQ

SEQ ID NO: 427 - protein, 91 aa, Artificial Sequence
  IgE-binding walked dimer 16, selected dimer IgE-1.16
CPANEFQCRNSSTCIPRRWLCDGDDDCGDGSDEPGCSAPASEPPGSLCRRAEFTCRNGSCLPVPWLCDAENDCPDGSDEPDCGSPARRSLQ

SEQ ID NO: 428 - protein, 89 aa, Artificial Sequence
  IgE-binding walked dimer 19, selected dimer IgE-1.19
CPANEFQCRNSSTCIPRRWLCDGDDDCGDGSDEPGCSAPASEPPGSLCPPDQFRCKNGRCIPRHLVCDGDDDCGDDSDEAGCQTRTSLQ

SEQ ID NO: 429 - protein, 93 aa, Artificial Sequence
  IgE-binding walked dimer 21, selected dimer IgE-1.21
CPANEFQCRNSSTCIPRRWLCDGDDDCGDGSDETGCSAPASEPPGSLCEPGQFQCNNNDTCVSPPWLCDADRDCGRSDERPPHCATPELTSLQ

SEQ ID NO: 430 - protein, 100 aa, Artificial Sequence
  IgE-binding walked dimer 23, selected dimer IgE-1.23
CPAGQFRCENGRCLPPPWRCDGVNDCEDNSDEAGCGDSHILPFSTPGPSTCPANEFQCRNSSTCIPRRWLCDGDDDCGDGSDETGCSAPASEPPGSLSLQ

SEQ ID NO: 431 - protein, 89 aa, Artificial Sequence
  IgE-binding walked dimer 25, selected dimer IgE-1.25
CPANEFQCRNSSTCIPRRWLCDGDDDCGDGSDEPGCSAPASEPPGSLCLSSQFRCENGQCIPLTWGCDGDDDCQDGSDETNCPTRTSLQ

SEQ ID NO: 432 - protein, 92 aa, Artificial Sequence
  IgE-binding walked dimer 26, selected dimer IgE-1.26
CPANEFQCRNSSTCIPRRWLCDGDDDCVDGSDETGCGSPVPTCPANEFQCRNSSTCIPRRWLCDGDDDCGDGSDETGCSAPASEPPGSLSLQ

SEQ ID NO: 433 - protein, 99 aa, Artificial Sequence
  IgE-binding walked dimer 30, selected dimer IgE-1.30
CPANEFQCRNSSTCIPRRWLCDGDDDCGDGSDEPGCSAPASEPPGSLCAASQFRCNNNSRCLPPPLGCDGVDDCGDNSDEADCGRPGPGATSAPAASLQ

SEQ ID NO: 434 - protein, 97 aa, Artificial Sequence
  IgE-binding walked dimer 31, selected dimer IgE-1.31
CPANEFQCRNSSTCIPRRWLCDGDDDCGDGSDETGCSAPASEPPGSLCPANEFQCRNSSTCIPRRWLCDGEDDCGDGSDETGCSAPASEPPGSLSLQ

SEQ ID NO: 435 - DNA, 30 bp, Artificial Sequence
  monomeric A domain assembly PCR oligonucleotide
attctcactcggccgacggtgcctacccgt

SEQ ID NO: 436 - DNA, 65 bp, Artificial Sequence
  monomeric A domain assembly PCR oligonucleotide
acggtgcctacccgtatgatgttccggattatgccccgggtctggaggcgtctggtggttcgtgt

SEQ ID NO: 437 - DNA, 85 bp, Artificial Sequence
  monomeric A domain assembly PCR oligonucleotide
  modified_base (1)...(85): n = g, a, c or t
cgccgtcgcaamscmasbbcnstgraabgcatntkyygkwayysykgcatyyaaattbgbygrdagvktbacacgaaccaccaga

SEQ ID NO: 438 - DNA, 82 bp, Artificial Sequence
  monomeric A domain assembly PCR oligonucleotide
  modified_base (21)...(21): n = g, a, c or t
cgccgtcgcaamscmasbbcnstgraabgcakykgccgytkyygcatyyaaattbgbygrdagvktbacacgaaccaccaga

SEQ ID NO: 439 - DNA, 82 bp, Artificial Sequence
  monomeric A domain assembly PCR oligonucleotide
  modified_base (1)...(82): n = g, a, c or t
cgccgtcgcaamscmasbbcnstgraabgcatntkyygkwayysykgcacbkgaactsgyycgvcnsacacgaaccaccaga

SEQ ID NO: 440 - DNA, 79 bp, Artificial Sequence
  monomeric A domain assembly PCR oligonucleotide
  modified_base (1)...(79): n = g, a, c or t
cgccgtcgcaamscmasbbcnstgraabgcakykgccgytkyygcacbkgaactsgyycgvcnsacacgaaccaccaga

SEQ ID NO: 441 - DNA, 40 bp, Artificial Sequence
  monomeric A domain assembly PCR oligonucleotide
  modified_base (24)...(24): n = g, a, c or t
ttgcgacggcgwwratgattgtsnggacrrctcggatgaa

SEQ ID NO: 442 - DNA, 40 bp, Artificial Sequence
  monomeric A domain assembly PCR oligonucleotide
ttgcgacggcgwwratgattgtssggacggctcggatgaa

SEQ ID NO: 443 - DNA, 40 bp, Artificial Sequence
  monomeric A domain assembly PCR oligonucleotide
ttgcgacggcgwwratgattgtsrggacrrctcggatgaa

SEQ ID NO: 444 - DNA, 40 bp, Artificial Sequence
  monomeric A domain assembly PCR oligonucleotide
  modified_base (24)...(24): n = g, a, c or t
ttgcgacggcgwwccggattgtsnggacrrctcggatgaa

SEQ ID NO: 445 - DNA, 40 bp, Artificial Sequence
  monomeric A domain assembly PCR oligonucleotide
ttgcgacggcgwwccggattgtssggacggctcggatgaa

SEQ ID NO: 446 - DNA, 40 bp, Artificial Sequence
  monomeric A domain assembly PCR oligonucleotide
ttgcgacggcgwwccggattgtsrggacrrctcggatgaa

SEQ ID NO: 447 - DNA, 50 bp, Artificial Sequence
  monomeric A domain assembly PCR oligonucleotide
aggcctgcaatgacgtabgckbtkbacagyytkyttcatccgagyygtcc

SEQ ID NO: 448 - DNA, 56 bp, Artificial Sequence
  monomeric A domain assembly PCR oligonucleotide
  modified_base (1)...(56): n = g, a, c or t
aggcctgcaatgacgtabgtncggnssytbyacagyytkyttcatccgagyygtcc

SEQ ID NO: 449 - DNA, 65 bp, Artificial Sequence
  monomeric A domain assembly PCR oligonucleotide
aggcctgcaatgacactttgtgaaattccggatcctggctacagyytkyttcatccgagyygtcc

SEQ ID NO: 450 - DNA, 71 bp, Artificial Sequence
  monomeric A domain assembly PCR oligonucleotide
aggcctgcaatgacagggaacccggcggttcagatgctggcgcgctacagyytkyttcatccgagyygtcc

SEQ ID NO: 451 - DNA, 77 bp, Artificial Sequence
  monomeric A domain assembly PCR oligonucleotide
aggcctgcaatgacgctgccggtgcagaagtcgcacctgggcccggacgaccacagyytkyttcatccgagyygtcc

SEQ ID NO: 452 - DNA, 83 bp, Artificial Sequence
  monomeric A domain assembly PCR oligonucleotide
aggcctgcaatgacgtgctcggacctggggtgctaaacggcagaatatgagaatcaccacagyytkyttcatccgagyygtcc

SEQ ID NO: 453 - DNA, 53 bp, Artificial Sequence
  monomeric A domain assembly PCR oligonucleotide
aggcctgcaatgacgtabgckbtkbacamwsckscgvttcatccgagccgtcc

SEQ ID NO: 454 - DNA, 59 bp, Artificial Sequence
  monomeric A domain assembly PCR oligonucleotide
  modified_base (1)...(59): n = g, a, c or t
aggcctgcaatgacgtabgtncggnssytbyacamwsckscgvttcatccgagccgtcc

SEQ ID NO: 455 - DNA, 68 bp, Artificial Sequence
  monomeric A domain assembly PCR oligonucleotide
aggcctgcaatgacactttgtgaaattccggatcctggctacamwsckscgvttcatccgagccgtcc

SEQ ID NO: 456 - DNA, 74 bp, Artificial Sequence
  monomeric A domain assembly PCR oligonucleotide
aggcctgcaatgacagggaacccggcggttcagatgctggcgcgctacamwsckscgvttcatccgagccgtcc

SEQ ID NO: 457 - DNA, 80 bp, Artificial Sequence
  monomeric A domain assembly PCR oligonucleotide
aggcctgcaatgacgctgccggtgcagaagtcgcacctgggcccggacgaccacamwsckscgvttcatccgagccgtcc

SEQ ID NO: 458 - DNA, 86 bp, Artificial Sequence
  monomeric A domain assembly PCR oligonucleotide
aggcctgcaatgacgtgctcggacctggggtgctaaacggcagaatatgagaatcaccacamwsckscgvttcatccgagccgtcc

SEQ ID NO: 459 - DNA, 56 bp, Artificial Sequence
  monomeric A domain assembly PCR oligonucleotide
aggcctgcaatgacgtabgckbtkbacagdkwkccrrcgvttcatccgagyygtcc

SEQ ID NO: 460 - DNA, 62 bp, Artificial Sequence
  monomeric A domain assembly PCR oligonucleotide
  modified_base (1)...(62): n = g, a, c or t
aggcctgcaatgacgtabgtncggnssytbyacagdkwkccrrcgvttcatccgagyygtcc

SEQ ID NO: 461 - DNA, 71 bp, Artificial Sequence
  monomeric A domain assembly PCR oligonucleotide
aggcctgcaatgacactttgtgaaattccggatcctggctacagdkwkccrrcgvttcatccgagyygtcc

SEQ ID NO: 462 - DNA, 77 bp, Artificial Sequence
  monomeric A domain assembly PCR oligonucleotide
aggcctgcaatgacagggaacccggcggttcagatgctggcgcgctacagdkwkccrrcgvttcatccgagyygtcc

SEQ ID NO: 463 - DNA, 83 bp, Artificial Sequence
  monomeric A domain assembly PCR oligonucleotide
aggcctgcaatgacgctgccggtgcagaagtcgcacctgggcccggacgaccacagdkwkccrrcgvttcatccgagyygtcc

SEQ ID NO: 464 - DNA, 89 bp, Artificial Sequence
  monomeric A domain assembly PCR oligonucleotide
aggcctgcaatgacgtgctcggacctggggtgctaaacggcagaatatgagaatcaccacagdkwkccrrcgvttcatccgagyygtcc

SEQ ID NO: 465 - DNA, 67 bp, Artificial Sequence
  monomeric A domain assembly PCR oligonucleotide
tgaattttctgtatgaggttttgctaaacaactttcaacagtttcggccccagaggcctgcaatgac

SEQ ID NO: 466 - DNA, 17 bp, Artificial Sequence
  A domain PCR amplification oligonucleotide
aagcctcagcgaccgaa

SEQ ID NO: 467 - DNA, 18 bp, Artificial Sequence
  A domain PCR amplification oligonucleotide
agcccaataggaacccat

SEQ ID NO: 468 - protein, 81 aa, Artificial Sequence
  clone CD28-A1
CGPGRFQCESGQCIPATWVCDGENDCVDDSDEKSCATTAPTCLPDQFQCHDYRRCIPLGWVCDGVPDCVDNSDEANCEPPT

SEQ ID NO: 469 - protein, 81 aa, Artificial Sequence
  clone CD28-A2
CGPGRFQCESGQCIPATWVCDGENDCVDDSDEKSCATTAPTCPPDQFTCNSGRCVPLNWLCDGVNDCADSSDEPPECQPRT

SEQ ID NO: 470 - protein, 135 aa, Artificial Sequence
  clone CD28-A10
CGPGRFQCESGQCVPATWVCDGDDDCADGSDEKSCATTAPTCESNQFQCGSGQCLPGTWRCDGVNDCADSSDETGCGRPGPGATSAPAACGPGRFQCNNGNCVPQTLGCDGDNDCGDSSDEANCSAPASEPPGSL

SEQ ID NO: 471 - protein, 83 aa, Artificial Sequence
  clone CD28-A4
CGPGRFQCESGQCIPATWVCDGENDCVDDSDEKSCATTAPTCPANQFQCGNGRCIPPAWLCDGVNDCGDGSDESQLCAATGPT

SEQ ID NO: 472 - protein, 85 aa, Artificial Sequence
  clone CD28-A5
CGPGRFQCESGQCIPATWVCDGENDCVDDSDEKSCATTAPTCLPNEFRCSNGQCIPPNWRCDGVDDCRDGSDEAGCSQDPEFHKV

SEQ ID NO: 473 - protein, 84 aa, Artificial Sequence
  clone CD28-A7
CGPGRFQCESGQCIPATWVCDGENDCVDDSDEKSCATTAPTCGSGQFRCSNGNCLPLRLGCDGVDDCGDSSDEPLDPCAATVRT

SEQ ID NO: 474 - protein, 80 aa, Artificial Sequence
  clone CD28-A17
CGPGRFQCESGQCIPATWVCDGENDCVDDSDEKSCATTAPTCPSGQFKCNSGRCVPPNWLCDGVNDCPDNSDEANCPPRT

SEQ ID NO: 475 - protein, 83 aa, Artificial Sequence
  clone CD28-A19
CGPGRFQCESGQCIPATWVCDGENDCVDDSDEKSCATTAPTCQADEFQCQSSGKCLPVNWVCDGDNDCGDDSDETNCATTGRT

SEQ ID NO: 476 - DNA, 30 bp, Artificial Sequence; identical to SEQ ID NO: 435
  monomeric A domain assembly PCR oligonucleotide

SEQ ID NO: 477 - DNA, 65 bp, Artificial Sequence; identical to SEQ ID NO: 436
  monomeric A domain assembly PCR oligonucleotide

SEQ ID NO: 478 - DNA, 85 bp, Artificial Sequence; identical to SEQ ID NO: 437
  monomeric A domain assembly PCR oligonucleotide
  modified_base (1)...(85): n = g, a, c or t

SEQ ID NO: 479 - DNA, 82 bp, Artificial Sequence; identical to SEQ ID NO: 438
  monomeric A domain assembly PCR oligonucleotide
  modified_base (21)...(21): n = g, a, c or t

SEQ ID NO: 480 - DNA, 82 bp, Artificial Sequence; identical to SEQ ID NO: 439
  monomeric A domain assembly PCR oligonucleotide
  modified_base (1)...(82): n = g, a, c or t

SEQ ID NO: 481 - DNA, 79 bp, Artificial Sequence; identical to SEQ ID NO: 440
  monomeric A domain assembly PCR oligonucleotide
  modified_base (1)...(79): n = g, a, c or t

SEQ ID NO: 482 - DNA, 40 bp, Artificial Sequence; identical to SEQ ID NO: 441
  monomeric A domain assembly PCR oligonucleotide
  modified_base (24)...(24): n = g, a, c or t

SEQ ID NO: 483 - DNA, 40 bp, Artificial Sequence; identical to SEQ ID NO: 442
  monomeric A domain assembly PCR oligonucleotide

SEQ ID NO: 484 - DNA, 40 bp, Artificial Sequence; identical to SEQ ID NO: 443
  monomeric A domain assembly PCR oligonucleotide

SEQ ID NO: 485 - DNA, 40 bp, Artificial Sequence; identical to SEQ ID NO: 444
  monomeric A domain assembly PCR oligonucleotide
  modified_base (24)...(24): n = g, a, c or t

SEQ ID NO: 486 - DNA, 40 bp, Artificial Sequence; identical to SEQ ID NO: 445
  monomeric A domain assembly PCR oligonucleotide

SEQ ID NO: 487 - DNA, 40 bp, Artificial Sequence; identical to SEQ ID NO: 446
  monomeric A domain assembly PCR oligonucleotide

SEQ ID NO: 488 - DNA, 50 bp, Artificial Sequence; identical to SEQ ID NO: 447
  monomeric A domain assembly PCR oligonucleotide

SEQ ID NO: 489 - DNA, 56 bp, Artificial Sequence; identical to SEQ ID NO: 448
  monomeric A domain assembly PCR oligonucleotide
  modified_base (1)...(56): n = g, a, c or t

SEQ ID NO: 490 - DNA, 65 bp, Artificial Sequence; identical to SEQ ID NO: 449
  monomeric A domain assembly PCR oligonucleotide

SEQ ID NO: 491 - DNA, 71 bp, Artificial Sequence; identical to SEQ ID NO: 450
  assembly PCR oligonucleotide

SEQ ID NO: 492 - DNA, 77 bp, Artificial Sequence; identical to SEQ ID NO: 451
  monomeric A domain assembly PCR oligonucleotide

SEQ ID NO: 493 - DNA, 83 bp, Artificial Sequence; identical to SEQ ID NO: 452
  monomeric A domain assembly PCR oligonucleotide

SEQ ID NO: 494 - DNA, 53 bp, Artificial Sequence; identical to SEQ ID NO: 453
  monomeric A domain assembly PCR oligonucleotide

SEQ ID NO: 495 - DNA, 59 bp, Artificial Sequence; identical to SEQ ID NO: 454
  monomeric A domain assembly PCR oligonucleotide
  modified_base (1)...(59): n = g, a, c or t

SEQ ID NO: 496 - DNA, 68 bp, Artificial Sequence; identical to SEQ ID NO: 455
  monomeric A domain assembly PCR oligonucleotide

SEQ ID NO: 497 - DNA, 74 bp, Artificial Sequence; identical to SEQ ID NO: 456
  monomeric A domain assembly PCR oligonucleotide

SEQ ID NO: 498 - DNA, 80 bp, Artificial Sequence; identical to SEQ ID NO: 457
  monomeric A domain assembly PCR oligonucleotide

SEQ ID NO: 499 - DNA, 86 bp, Artificial Sequence; identical to SEQ ID NO: 458
  monomeric A domain assembly PCR oligonucleotide

SEQ ID NO: 500 - DNA, 56 bp, Artificial Sequence; identical to SEQ ID NO: 459
  monomeric A domain assembly PCR oligonucleotide

SEQ ID NO: 501 - DNA, 62 bp, Artificial Sequence; identical to SEQ ID NO: 460
  monomeric A domain assembly PCR oligonucleotide
  modified_base (1)...(62): n = g, a, c or t

SEQ ID NO: 502 - DNA, 71 bp, Artificial Sequence; identical to SEQ ID NO: 461
  monomeric A domain assembly PCR oligonucleotide

SEQ ID NO: 503 - DNA, 77 bp, Artificial Sequence; identical to SEQ ID NO: 462
  monomeric A domain assembly PCR oligonucleotide

SEQ ID NO: 504 - DNA, 83 bp, Artificial Sequence; identical to SEQ ID NO: 463
  monomeric A domain assembly PCR oligonucleotide

SEQ ID NO: 505 - DNA, 89 bp, Artificial Sequence; identical to SEQ ID NO: 464
  monomeric A domain assembly PCR oligonucleotide

SEQ ID NO: 506 - DNA, 67 bp, Artificial Sequence; identical to SEQ ID NO: 465
  monomeric A domain assembly PCR oligonucleotide

SEQ ID NO: 507 - protein, 97 aa, Artificial Sequence
  clone IL6#4, IL-6 clone 4
CLSSQFQCKNGQCIPQTWVCDGDNDCEDDSDETGCGDSHILPFSTPGPSTCPPSQFTCRSTNTCIPAPWRCDGDDDCEDDSDEEGCSAPASEPPGSL

SEQ ID NO: 508 - protein, 90 aa, Artificial Sequence
  clone IL6#7
CLSSQFQCKNGQCIPQTWVCDGDNDCEDDSDETGCGDSHILPFSTPGPSTCRSNEFQCRSSGICIPRTWVCDGDDDCLDNSDEKDCAART

SEQ ID NO: 509 - protein, 96 aa, Artificial Sequence
  clone IL6#9, IL-6 clone 9
CRSDQFQCGSGHCIPQDWVCDGENDCEDGSDETDCSAPASEPPGSLCLSSQFQCKNGQCIPQTWVCDGDNDCEDDSDETGCGDSHILPFSTPGPST

SEQ ID NO: 510 - protein, 86 aa, Artificial Sequence
  clone IL6#P8
CRSDQFQCGSGHCIPQDWVCDGENDCEDGSDETDCSAPASEPPGSLCRSNEFQCRSSGICIPRTWVCDGDDDCLDNSDEKDCAART

SEQ ID NO: 511 - protein, 101 aa, Artificial Sequence
  clone IL6#N7
CPPSQFTCRSTNTCIPAPWRCDGDDDCEDDSDEADCGDSHILPFSTPGPSTCLSSQFQCKNGQCIPQTWVCDGDNDCEDDSDETGCGDSHILPFSTPGPST

SEQ ID NO: 512 - protein, 47 aa, Artificial Sequence
  phage clone IgE-1
CPANEFQCRNSSTCIPRRWLCDGDDDCGDGSDETGCSAPASEPPGSL

SEQ ID NO: 513 - protein, 46 aa, Artificial Sequence
  phage clone IgE-2
CAASEFQCNSGNCVPGRWLCDGENDCEDSSDEAPALCTTSGPTSLQ

SEQ ID NO: 514 - protein, 51 aa, Artificial Sequence
  phage clone IgE-3
CQSNEFQCISGHCIPARWVCDGENDCGDGSDEAPDLCSAPASEPPGSLSLQ

SEQ ID NO: 515 - protein, 94 aa, Artificial Sequence
  unselected dimer IgE-1.6U
CPANEFQCRNSSTCIPRRWLCDGDDDCGDGSDETGCSAPASEPPGSLCQPGEFPCNSGQCLPLGWVCDGEDDCADGSDEKSCSQDPEFHKVSLQ

SEQ ID NO: 516 - protein, 99 aa, Artificial Sequence
  unselected dimer IgE-1.9U
CPANEFQCRNSSTCIPRRWLCDGDDDCGDGSDETGCSAPASEPPGSLCRASEFPCRDNSKCVPATWRCDGVDDCEDGSDETGCGRPGPGATSAPAASLQ

SEQ ID NO: 517 - protein, 97 aa, Artificial Sequence
  unselected dimer IgE-1.10U
CDPSAKFECSSGNCLSGPLRCDGVNDCGDSSDEPSALCSQDPEFHKVCPANEFQCRNSSTCIPRRWLCDGDDDCGDGSDETGCSAPASEPPGSLSLQ

SEQ ID NO: 518 - protein, 89 aa, Artificial Sequence
  unselected dimer IgE-1.4U
CPPNEFQCSNGHCLSQPWFCDGVNDCGDNSDEENCATHTCPANEFQCRNSSTCIPLRWLCDGDDDCGDGSDETGCSAPASEPPGSLSLQ

SEQ ID NO: 519 - protein, 101 aa, Artificial Sequence
  unselected dimer IgE-1.2U
CLADQFPCKSGKCIPLHWGCDGVNDCGDGSDESQLCGDSHILPFSTPGPSTCPANEFQCRNSSTCIPRRWLCDGDDDCGDGSDETGCSAPASEPPGSLSLQ

SEQ ID NO: 520 - protein, 194 aa, Artificial Sequence
  multimer IgE-1.23.23
CPAGQFRCENGRCLPPPWRCDGVNDCEDNSDEAGCGDSHILPFSTPGPSTCPANEFQCRNSSTCIPRRWLCDGDDDCGDGSDETGCSAPASEPPGSLCPAGQFRCENGRCLPPPWRCDGVNDCEDNSDEAGCGDSHILPFSTPGPSTCPANEFQCRNSSTCIPRRWLCDGDDDCGDGSDETGCSAPASEPPGSL

SEQ ID NO: 521 - protein, 183 aa, Artificial Sequence
  multimer IgE-1.23.1
CPAGQFRCENGRCLPPPWRCDGVNDCEDNSDEAGCGDSHILPFSTPGPSTCPANEFQCRNSSTCIPRRWLCDGDDDCGDGSDETGCSAPASEPPGSLCPANEFQCRNSSTCIPRRWLCDGDDDCGDGSDETGCSAPASEPPGSLCQPDQFRCSSGRCLSREWLCDGEDDCEDDSDETDCPTRT

SEQ ID NO: 522 - protein, 183 aa, Artificial Sequence
  multimer IgE-1.1.23
CPANEFQCRNSSTCIPRRWLCDGDDDCGDGSDETGCSAPASEPPGSLCQPDQFRCSSGRCLSREWLCDGEDDCEDDSDETDCPTRTCPAGQFRCENGRCLPPPWRCDGVNDCEDNSDEAGCGDSHILPFSTPGPSTCPANEFQCRNSSTCIPRRWLCDGDDDCGDGSDETGCSAPASEPPGSL

SEQ ID NO: 523 - protein, 172 aa, Artificial Sequence
  multimer IgE-1.1.1
CPANEFQCRNSSTCIPRRWLCDGDDDCGDGSDETGCSAPASEPPGSLCQPDQFRCSSGRCLSREWLCDGEDDCEDDSDETDCPTRTCPANEFQCRNSSTCIPRRWLCDGDDDCGDGSDETGCSAPASEPPGSLCQPDQFRCSSGRCLSREWLCDGEDDCEDDSDETDCPTRT

SEQ ID NO: 524 - protein, 136 aa, Artificial Sequence
  multimer IgE-1.23x1
CPAGQFRCENGRCLPPPWRCDGVNDCEDNSDEAGCGDSHILPFSTPGPSTCPANEFQCRNSSTCIPRRWLCDGDDDCGDGSDETGCSAPASEPPGSLCQPDQFRCSSGRCLSREWLCDGEDDCEDDSDETDCPTRT

SEQ ID NO: 525 - DNA, 35 bp, Artificial Sequence
  Construct 1 anti-BAFF-A3-Fc fusion oligo BA-FC-F8
gatgaaaaaagctgtaaaccggaattctgtctgtc

SEQ ID NO: 526 - DNA, 38 bp, Artificial Sequence
  Construct 1 anti-BAFF-A3-Fc fusion oligo BA-FC-R8
cggacgggccagtttggcctacgcggccgccgtaggct

SEQ ID NO: 527 - DNA, 375 bp, Artificial Sequence
  Construct 1 anti-BAFF-A3-Fc fusion final sequence
gaattctgtctgtcgggccagttccagtgcaacgattccggcatatgcattccacggcactgggtttgcgacggcgttaatgattgtgaggacgactcggatgaagcaggctgtacacagcctacgtgtctgtcgggccagttccagtgcaacgattccggcatatgcattccacggcactgggtttgcgacggcgttaatgattgtgaggacgactcggatgaagcaggctgtacacagcctacgtgtctgtcgggccagttccagtgcaacgattccggcatatgcattccacggcactgggtttgcgacggcgttaatgattgtgaggacgactcggatgaagcaggctgtacacagcctacggcggccgca

SEQ ID NO: 528 - DNA, 37 bp, Artificial Sequence
  Construct 2 anti-IgG156-BAFF-A3 oligo BA-NT-F
ggtctggaggcgtctggtgaattctgtctgtcgagcg

SEQ ID NO: 529 - DNA, 41 bp, Artificial Sequence
  Construct 2 anti-IgG156-BAFF-A3 oligo BA-NT-R8
cggacgggccagtttggcctacgcggccgcctacgtaggct

SEQ ID NO: 530 - DNA, 498 bp, Artificial Sequence
  Construct 2 anti-IgG156-BAFF-A3 final sequence
gaattctgtctgtcgagcgagttccagtgccagagttccggcagatgcattccactggcctgggtttgcgacggcgataatgattgtcgggacgactcggatgaaaaaagctgtaaaccgcgtacgtgtctgtcgggccagttccagtgcaacgattccggcatatgcattccacggcactgggtttgcgacggcgttaatgattgtgaggacgactcggatgaagcaggctgtacacagcctacgtgtctgtcgggccagttccagtgcaacgattccggcatatgcattccacggcactgggtttgcgacggcgttaatgattgtgaggacgactcggatgaagcaggctgtacacagcctacgtgtctgtcgggccagttccagtgcaacgattccggcatatgcattccacggcactgggtttgcgacggcgttaatgattgtgaggacgactcggatgaagcaggctgtacacagcctacgtaggcggccgca

SEQ ID NO: 531 - DNA, 63 bp, Artificial Sequence
  5'-phosphorylated oligonucleotide loxP(K)
  modified_base (1)...(1): n = 5'-phosphorylated a
ngcttataacttcgtatagaaaggtatatacgaagttatagatctcgtgctgcatgcggtgcg

SEQ ID NO: 532 - DNA, 67 bp, Artificial Sequence
  5'-phosphorylated oligonucleotide loxP(K_rc)
  modified_base (1)...(1): n = 5'-phosphorylated a
nattcgcaccgcatgcagcacgagatctataacttcgtatatacctttctatacgaagttataagct

SEQ ID NO: 533 - DNA, 38 bp, Artificial Sequence
  5'-phosphorylated oligonucleotide loxP(L)
  modified_base (1)...(1): n = 5'-phosphorylated a
ntaacttcgtatagcatacattatacgaagttatcgag

SEQ ID NO: 534 - DNA, 39 bp, Artificial Sequence
  5'-phosphorylated oligonucleotide loxP(L_rc)
  modified_base (1)...(1): n = 5'-phosphorylated c
ntcgataacttcgtataatgtatgctatacgaagttatg

SEQ ID NO: 535 - DNA, 79 bp, Artificial Sequence
  5'-phosphorylated oligonucleotide loxP(I)
  modified_base (1)...(1): n = 5'-phosphorylated c
ncgggagcagggcatgctaagtgagtaataagtgagtaaataacttcgtatatacctttctatacgaagttatcgtctg

SEQ ID NO: 536 - DNA, 72 bp, Artificial Sequence
  5'-phosphorylated oligonucleotide loxP(I_rc)
  modified_base (0)...(0): n = 5'-phosphorylated a
ncgataacttcgtatagaaaggtatatacgaagttatttactcacttattactcacttagcatgccctgctc

SEQ ID NO: 537 - DNA, 59 bp, Artificial Sequence
  oligonucleotide loxP(J)
ccgggaccagtggcctctggggccataacttcgtatagcatacattatacgaagttatg

SEQ ID NO: 538 - DNA, 55 bp, Artificial Sequence
  oligonucleotide loxP(J_rc)
cataacttcgtataatgtatgctatacgaagttatggccccagaggccactggtc

SEQ ID NO: 539 - DNA, 30 bp, Artificial Sequence
  oligonucleotide gIIIPromoter_EcoRI
atggcgaattctcattgtcggcgcaactat

SEQ ID NO: 540 - DNA, 33 bp, Artificial Sequence
  oligonucleotide gIIIPromoter_HinDIII
gataagctttcattaagactccttattacgcag

SEQ ID NO: 541 - protein, 36 aa, Artificial Sequence
  human calcium binding epidermal growth factor (CaEGF) domain
  MOD_RES (1)...(1): Xaa = Val, Thr, Ile, Lys, Glu or Ala
  MOD_RES (3)...(3): Xaa = Val or Ile
  MOD_RES (7)...(7): Xaa = Val, Ser, Leu, Ala, Asp, Glu, Gly, Lys, Asn, Arg or Thr
  MOD_RES (8)...(8): Xaa = Ser, Pro, Glu, Leu, Gln or Val
  MOD_RES (9)...(9): Xaa = Ser, Gly, Asn, Asp, Ile or Val
  MOD_RES (10)...(10): Xaa = Pro, Ala or Ser
  MOD_RES (12)...(12): Xaa = Val, Thr, Ser, Arg, Gln, Pro, Asn, Met, Leu, Lys, Ile, His, Gly, Glu, Asp or Ala
  MOD_RES (13)...(13): Xaa = Ser, Pro, Glu, Leu, Gln or Val
  MOD_RES (14)...(14): Xaa = Gly, Asp, Asn or Ser
  MOD_RES (15)...(15): Xaa = Ser, Arg, Gln, Asn, Leu, Lys, Ile, His, Ala or Gly
  MOD_RES (17)...(17): Xaa = Val, Gln, Leu, Lys, Ile or Glu
  MOD_RES (19)...(19): Xaa = Thr, Ser, Leu or Ile
  MOD_RES (20)...(20): Xaa = Val, Gln, Pro, Leu, Glu or Ala
  MOD_RES (22)...(22): Xaa = Ser or Gly
  MOD_RES (23)...(23): Xaa = Thr or Phe
  MOD_RES (24)...(24): Xaa = Ser, Arg, Gln, Lys or His
  MOD_RES (26)...(26): Xaa = Val, Ser, Arg, Gln, Asn, Met, Leu, Lys, Ile, His, Gly, Glu or Asp
  MOD_RES (28)...(28): Xaa = Val, Pro, Leu, Ala, His, Asn, Arg, Ser or Thr
  MOD_RES (29)...(29): Xaa = Gln, Pro, Glu, Ala, Lys or Thr
  MOD_RES (31)...(31): Xaa = Tyr or Phe
  MOD_RES (32)...(32): Xaa = Thr, Ser, Ala, Glu, Lys, Leu, Met, Pro, Gln or Val
  MOD_RES (33)...(33): Xaa = Gly, Leu, Pro, Gln or Arg
  MOD_RES (34)...(34): Xaa = Val, Thr, Gln, Pro, Leu, Lys, Ile, Glu, Ala, Asp, Gly, Asn or Ser
  MOD_RES (35)...(35): Xaa = Ser, Arg, Asn, Leu, Ile, His, Ala, Glu, Gly, Pro or Gln
XDXBECXXXXCXXXXCXBXXGXXXCXCXXGXXXXXC

SEQ ID NO: 542 - protein, 37 aa, Artificial Sequence
  human calcium binding epidermal growth factor (CaEGF) domain
  MOD_RES (1)...(1): Xaa = Val, Thr, Ile, Lys, Glu or Ala
  MOD_RES (3)...(3): Xaa = Val or Ile
  MOD_RES (7)...(7): Xaa = Val, Ser, Leu, Ala, Asp, Glu, Gly, Lys, Asn, Arg or Thr
  MOD_RES (8)...(8): Xaa = Ser, Pro, Glu, Leu, Gln or Val
  MOD_RES (9)...(9): Xaa = Ser, Gly, Asn, Asp, Ile or Val
  MOD_RES (10)...(10): Xaa = Pro, Ala or Ser
  MOD_RES (12)...(12): Xaa = Val, Thr, Ser, Arg, Gln, Pro, Asn, Met, Leu, Lys, Ile, His, Gly, Glu, Asp or Ala
  MOD_RES (13)...(13): Xaa = Ser, Pro, Glu, Leu, Gln or Val
  MOD_RES (14)...(14): Xaa = Gly, Asp, Asn or Ser
  MOD_RES (15)...(15): Xaa = Ser, Arg, Gln, Asn, Leu, Lys, Ile, His, Ala or Gly
  MOD_RES (17)...(17): Xaa = Val, Gln, Leu, Lys, Ile or Glu
  MOD_RES (19)...(19): Xaa = Thr, Ser, Leu or Ile
  MOD_RES (20)...(20): Xaa = Val, Gln, Pro, Leu, Glu or Ala
  MOD_RES (22)...(22): Xaa = Ser or Gly
  MOD_RES (23)...(23): Xaa = Thr or Phe
  MOD_RES (24)...(24): Xaa = Ser, Arg, Gln, Lys or His
  MOD_RES (26)...(26): Xaa = Val, Ser, Arg, Gln, Asn, Met, Leu, Lys, Ile, His, Gly, Glu or Asp
  MOD_RES (28)...(28): Xaa = Val, Pro, Leu, Ala, His, Asn, Arg, Ser or Thr
  MOD_RES (29)...(29): Xaa = Gln, Pro, Glu, Ala, Lys or Thr
  MOD_RES (31)...(31): Xaa = Tyr or Phe
  MOD_RES (32)...(32): Xaa = Thr, Ser, Ala, Glu, Lys, Leu, Met, Pro, Gln or Val
  MOD_RES (33)...(33): Xaa = Gly, Leu, Pro, Gln or Arg
  MOD_RES (34)...(34): Xaa = Val, Thr, Gln, Pro, Leu, Lys, Ile, Glu, Ala, Asp, Gly, Asn or Ser
  MOD_RES (35)...(35): Xaa = Ser, Arg, Asn, Leu, Ile, His, Ala, Glu, Gly, Pro or Gln
  MOD_RES (36)...(36): Xaa = Ala, Asp, Asn or Thr
XDXBECXXXXCXXXXCXBXXGXXXCXCXXGXXXXXXC

SEQ ID NO: 543 - protein, 38 aa, Artificial Sequence
  human calcium binding epidermal growth factor (CaEGF) domain
  MOD_RES (1)...(1): Xaa = Val, Thr, Ile, Lys, Glu or Ala
  MOD_RES (3)...(3): Xaa = Val or Ile
  MOD_RES (7)...(7): Xaa = Val, Ser, Leu, Ala, Asp, Glu, Gly, Lys, Asn, Arg or Thr
  MOD_RES (8)...(8): Xaa = Ser, Pro, Glu, Leu, Gln or Val
  MOD_RES (9)...(9): Xaa = Ser, Gly, Asn, Asp, Ile or Val
  MOD_RES (10)...(10): Xaa = Pro, Ala or Ser
  MOD_RES (12)...(12): Xaa = Val, Thr, Ser, Arg, Gln, Pro, Asn, Met, Leu, Lys, Ile, His, Gly, Glu, Asp or Ala
  MOD_RES (13)...(13): Xaa = Ser, Pro, Glu, Leu, Gln or Val
  MOD_RES (14)...(14): Xaa = Gly, Asp, Asn or Ser
  MOD_RES (15)...(15): Xaa = Ser, Arg, Gln, Asn, Leu, Lys, Ile, His, Ala or Gly
  MOD_RES (17)...(17): Xaa = Val, Gln, Leu, Lys, Ile or Glu
  MOD_RES (19)...(19): Xaa = Thr, Ser, Leu or Ile
  MOD_RES (20)...(20): Xaa = Val, Gln, Pro, Leu, Glu or Ala
  MOD_RES (22)...(22): Xaa = Ser or Gly
  MOD_RES (23)...(23): Xaa = Thr or Phe
  MOD_RES (24)...(24): Xaa = Ser, Arg, Gln, Lys or His
  MOD_RES (26)...(26): Xaa = Val, Ser, Arg, Gln, Asn, Met, Leu, Lys, Ile, His, Gly, Glu or Asp
  MOD_RES (28)...(28): Xaa = Val, Pro, Leu, Ala, His, Asn, Arg, Ser or Thr
  MOD_RES (29)...(29): Xaa = Gln, Pro, Glu, Ala, Lys or Thr
  MOD_RES (31)...(31): Xaa = Tyr or Phe
  MOD_RES (32)...(32): Xaa = Thr, Ser, Ala, Glu, Lys, Leu, Met, Pro, Gln or Val
  MOD_RES (33)...(33): Xaa = Gly, Leu, Pro, Gln or Arg
  MOD_RES (34)...(34): Xaa = Val, Thr, Gln, Pro, Leu, Lys, Ile, Glu, Ala, Asp, Gly, Asn or Ser
  MOD_RES (35)...(35): Xaa = Ser, Arg, Asn, Leu, Ile, His, Ala, Glu, Gly, Pro or Gln
  MOD_RES (36)...(36): Xaa = Ala, Asp, Asn or Thr
  MOD_RES (37)...(37): Xaa = Gly, Arg or Ser
XDXBECXXXXCXXXXCXBXXGXXXCXCXXGXXXXXXXC

SEQ ID NO: 544 - protein, 39 aa, Artificial Sequence
  human calcium binding epidermal growth factor (CaEGF) domain
  MOD_RES (1)...(1): Xaa = Val, Thr, Ile, Lys, Glu or Ala
  MOD_RES (3)...(3): Xaa = Val or Ile
  MOD_RES (7)...(7): Xaa = Val, Ser, Leu, Ala, Asp, Glu, Gly, Lys, Asn, Arg or Thr
  MOD_RES (8)...(8): Xaa = Ser, Pro, Glu, Leu, Gln or Val
  MOD_RES (9)...(9): Xaa = Ser, Gly, Asn, Asp, Ile or Val
  MOD_RES (10)...(10): Xaa = Pro, Ala or Ser
  MOD_RES (12)...(12): Xaa = Val, Thr, Ser, Arg, Gln, Pro, Asn, Met, Leu, Lys, Ile, His, Gly, Glu, Asp or Ala
  MOD_RES (13)...(13): Xaa = Ser, Pro, Glu, Leu, Gln or Val
  MOD_RES (14)...(14): Xaa = Gly, Asp, Asn or Ser
  MOD_RES (15)...(15): Xaa = Ser, Arg, Gln, Asn, Leu, Lys, Ile, His, Ala or Gly
  MOD_RES (17)...(17): Xaa = Val, Gln, Leu, Lys, Ile or Glu
  MOD_RES (19)...(19): Xaa = Thr, Ser, Leu or Ile
  MOD_RES (20)...(20): Xaa = Val, Gln, Pro, Leu, Glu or Ala
  MOD_RES (22)...(22): Xaa = Ser or Gly
  MOD_RES (23)...(23): Xaa = Thr or Phe
  MOD_RES (24)...(24): Xaa = Ser, Arg, Gln, Lys or His
  MOD_RES (26)...(26): Xaa = Val, Ser, Arg, Gln, Asn, Met, Leu, Lys, Ile, His, Gly, Glu or Asp
  MOD_RES (28)...(28): Xaa = Val, Pro, Leu, Ala, His, Asn, Arg, Ser or Thr
  MOD_RES (29)...(29): Xaa = Gln, Pro, Glu, Ala, Lys or Thr
  MOD_RES (31)...(31): Xaa = Tyr or Phe
  MOD_RES (32)...(32): Xaa = Thr, Ser, Ala, Glu, Lys, Leu, Met, Pro, Gln or Val
  MOD_RES (33)...(33): Xaa = Gly, Leu, Pro, Gln or Arg
  MOD_RES (34)...(34): Xaa = Val, Thr, Gln, Pro, Leu, Lys, Ile, Glu, Ala, Asp, Gly, Asn or Ser
  MOD_RES (35)...(35): Xaa = Ser, Arg, Asn, Leu, Ile, His, Ala, Glu, Gly, Pro or Gln
  MOD_RES (36)...(36): Xaa = Ala, Asp, Asn or Thr
  MOD_RES (37)...(37): Xaa = Gly, Arg or Ser
  MOD_RES (38)...(38): Xaa = Lys, Asn, Arg, Ser or Thr
XDXBECXXXXCXXXXCXXXXGXXXCXCXXGXXXXXXXXC

SEQ ID NO: 545 - protein, 40 aa, Artificial Sequence
  human calcium binding epidermal growth factor (CaEGF) domain
  MOD_RES (1)...(1): Xaa = Val, Thr, Ile, Lys, Glu or Ala
  MOD_RES (3)...(3): Xaa = Val or Ile
  MOD_RES (7)...(7): Xaa = Val, Ser, Leu, Ala, Asp, Glu, Gly, Lys, Asn, Arg or Thr
  MOD_RES (8)...(8): Xaa = Ser, Pro, Glu, Leu, Gln or Val
  MOD_RES (9)...(9): Xaa = Ser, Gly, Asn, Asp, Ile or Val
  MOD_RES (10)...(10): Xaa = Pro, Ala or Ser
  MOD_RES (12)...(12): Xaa = Val, Thr, Ser, Arg, Gln, Pro, Asn, Met, Leu, Lys, Ile, His, Gly, Glu, Asp or Ala
  MOD_RES (13)...(13): Xaa = Ser, Pro, Glu, Leu, Gln or Val
  MOD_RES (14)...(14): Xaa = Gly, Asp, Asn or Ser
  MOD_RES (15)...(15): Xaa = Ser, Arg, Gln, Asn, Leu, Lys, Ile, His, Ala or Gly
  MOD_RES (17)...(17): Xaa = Val, Gln, Leu, Lys, Ile or Glu
  MOD_RES (19)...(19): Xaa = Thr, Ser, Leu or Ile
  MOD_RES (20)...(20): Xaa = Val, Gln, Pro, Leu, Glu or Ala
  MOD_RES (22)...(22): Xaa = Ser or Gly
  MOD_RES (23)...(23): Xaa = Thr or Phe
  MOD_RES (24)...(24): Xaa = Ser, Arg, Gln, Lys or His
  MOD_RES (26)...(26): Xaa = Val, Ser, Arg, Gln, Asn, Met, Leu, Lys, Ile, His, Gly, Glu or Asp
  MOD_RES (28)...(28): Xaa = Val, Pro, Leu, Ala, His, Asn, Arg, Ser or Thr
  MOD_RES (29)...(29): Xaa = Gln, Pro, Glu, Ala, Lys or Thr
  MOD_RES (31)...(31): Xaa = Tyr or Phe
  MOD_RES (32)...(32): Xaa = Thr, Ser, Ala, Glu, Lys, Leu, Met, Pro, Gln or Val
  MOD_RES (33)...(33): Xaa = Gly, Leu, Pro, Gln or Arg
  MOD_RES (34)...(34): Xaa = Val, Thr, Gln, Pro, Leu, Lys, Ile, Glu, Ala, Asp, Gly, Asn or Ser
  MOD_RES (35)...(35): Xaa = Ser, Arg, Asn, Leu, Ile, His, Ala, Glu, Gly, Pro or Gln
  MOD_RES (36)...(36): Xaa = Ala, Asp, Asn or Thr
  MOD_RES (37)...(37): Xaa = Gly, Arg or Ser
  MOD_RES (38)...(38): Xaa = Lys, Asn, Arg, Ser or Thr
  MOD_RES (39)...(39): Xaa = Ala, Asp, Glu, Gly, Lys, Asn, Arg, Ser or Thr
XDXBECXXXXCXXXXCXBXXGXXXCXCXXGXXXXXXXXXC

SEQ ID NO: 546 - protein, 37 aa, Artificial Sequence
  human calcium binding epidermal growth factor (CaEGF) domain
  MOD_RES (1)...(1): Xaa = Val, Thr, Ile, Lys, Glu or Ala
  MOD_RES (3)...(3): Xaa = Val or Ile
  MOD_RES (7)...(7): Xaa = Val, Ser, Leu, Ala, Asp, Glu, Gly, Lys, Asn, Arg or Thr
  MOD_RES (8)...(8): Xaa = Ser, Pro, Glu, Leu, Gln or Val
  MOD_RES (9)...(9): Xaa = Ser, Gly, Asn, Asp, Ile or Val
  MOD_RES (10)...(10): Xaa = Pro, Ala or Ser
  MOD_RES (11)...(11): Xaa = Asp, Gly, His, Asn, Arg or Ser
  MOD_RES (13)...(13): Xaa = Val, Thr, Ser, Arg, Gln, Pro, Asn, Met, Leu, Lys, Ile, His, Gly, Glu, Asp or Ala
  MOD_RES (14)...(14): Xaa = Ser, Arg, Asn or His
  MOD_RES (15)...(15): Xaa = Gly, Asp, Asn or Ser
  MOD_RES (16)...(16): Xaa = Ser, Arg, Gln, Asn, Leu, Lys, Ile, His, Ala or Gly
  MOD_RES (18)...(18): Xaa = Val, Gln, Leu, Lys, Ile or Glu
  MOD_RES (20)...(20): Xaa = Thr, Ser, Leu or Ile
  MOD_RES (21)...(21): Xaa = Val, Gln, Pro, Leu, Glu or Ala
  MOD_RES (23)...(23): Xaa = Ser or Gly
  MOD_RES (24)...(24): Xaa = Thr or Phe
  MOD_RES (25)...(25): Xaa = Ser, Arg, Gln, Lys or His
  MOD_RES (27)...(27): Xaa = Val, Ser, Arg, Gln, Asn, Met, Leu, Lys, Ile, His, Gly, Glu or Asp
  MOD_RES (29)...(29): Xaa = Val, Pro, Leu, Ala, His, Asn, Arg, Ser or Thr
  MOD_RES (30)...(30): Xaa = Gln, Pro, Glu, Ala, Lys or Thr
  MOD_RES (32)...(32): Xaa = Tyr or Phe
  MOD_RES (33)...(33): Xaa = Thr, Ser, Ala, Glu, Lys, Leu, Met, Pro, Gln or Val
  MOD_RES (34)...(34): Xaa = Gly, Leu, Pro, Gln or Arg
  MOD_RES (35)...(35): Xaa = Val, Thr, Gln, Pro, Leu, Lys, Ile, Glu, Ala, Asp, Gly, Asn or Ser
  MOD_RES (36)...(36): Xaa = Ser, Arg, Asn, Leu, Ile, His, Ala, Glu, Gly, Pro or Gln
XDXBECXXXXXCXXXXCXNXXGXXXCXCXXGXXXXXC

SEQ ID NO: 547 - protein, 38 aa, Artificial Sequence
  human calcium binding epidermal growth factor (CaEGF) domain
  MOD_RES (1)...(1): Xaa = Val, Thr, Ile, Lys, Glu or Ala
  MOD_RES (3)...(3): Xaa = Val or Ile
  MOD_RES (7)...(7): Xaa = Val, Ser, Leu, Ala, Asp, Glu, Gly, Lys, Asn, Arg or Thr
  MOD_RES (8)...(8): Xaa = Ser, Pro, Glu, Leu, Gln or Val
  MOD_RES (9)...(9): Xaa = Ser, Gly, Asn, Asp, Ile or Val
  MOD_RES (10)...(10): Xaa = Pro, Ala or Ser
  MOD_RES (11)...(11): Xaa = Asp, Gly, His, Asn, Arg or Ser
  MOD_RES (13)...(13): Xaa = Val, Thr, Ser, Arg, Gln, Pro, Asn, Met, Leu, Lys, Ile, His, Gly, Glu, Asp or Ala
  MOD_RES (14)...(14): Xaa = Ser, Arg, Asn or His
  MOD_RES (15)...(15): Xaa = Gly, Asp, Asn or Ser
  MOD_RES (16)...(16): Xaa = Ser, Arg, Gln, Asn, Leu, Lys, Ile, His, Ala or Gly
  MOD_RES (18)...(18): Xaa = Val, Gln, Leu, Lys, Ile or Glu
  MOD_RES (20)...(20): Xaa = Thr, Ser, Leu or Ile
  MOD_RES (21)...(21): Xaa = Val, Gln, Pro, Leu, Glu or Ala
  MOD_RES (23)...(23): Xaa = Ser or Gly
  MOD_RES (24)...(24): Xaa = Thr or Phe
  MOD_RES (25)...(25): Xaa = Ser, Arg, Gln, Lys or His
  MOD_RES (27)...(27): Xaa = Val, Ser, Arg, Gln, Asn, Met, Leu, Lys, Ile, His, Gly, Glu or Asp
  MOD_RES (29)...(29): Xaa = Val, Pro, Leu, Ala, His, Asn, Arg, Ser or Thr
  MOD_RES (30)...(30): Xaa = Gln, Pro, Glu, Ala, Lys or Thr
  MOD_RES (32)...(32): Xaa = Tyr or Phe
  MOD_RES (33)...(33): Xaa = Thr, Ser, Ala, Glu, Lys, Leu, Met, Pro, Gln or Val
  MOD_RES (34)...(34): Xaa = Gly, Leu, Pro, Gln or Arg
  MOD_RES (35)...(35): Xaa = Val, Thr, Gln, Pro, Leu, Lys, Ile, Glu, Ala, Asp, Gly, Asn or Ser
  MOD_RES (36)...(36): Xaa = Ser, Arg, Asn, Leu, Ile, His, Ala, Glu, Gly, Pro or Gln
  MOD_RES (37)...(37): Xaa = Ala, Asp, Asn or Thr
XDXBECXXXXXCXXXXCXBXXGXXXCXCXXGXXXXXXC

SEQ ID NO: 548 - protein, 39 aa, Artificial Sequence
  human calcium binding epidermal growth factor (CaEGF) domain
  MOD_RES (1)...(1): Xaa = Val, Thr, Ile, Lys, Glu or Ala
  MOD_RES (3)...(3): Xaa = Val or Ile
  MOD_RES (7)...(7): Xaa = Val, Ser, Leu, Ala, Asp, Glu, Gly, Lys, Asn, Arg or Thr
  MOD_RES (8)...(8): Xaa = Ser, Pro, Glu, Leu, Gln or Val
  MOD_RES (9)...(9): Xaa = Ser, Gly, Asn, Asp, Ile or Val
  MOD_RES (10)...(10): Xaa = Pro, Ala or Ser
  MOD_RES (11)...(11): Xaa = Asp, Gly, His, Asn, Arg or Ser
  MOD_RES (13)...(13): Xaa = Val, Thr, Ser, Arg, Gln, Pro, Asn, Met, Leu, Lys, Ile, His, Gly, Glu, Asp or Ala
  MOD_RES (14)...(14): Xaa = Ser, Arg, Asn or His
  MOD_RES (15)...(15): Xaa = Gly, Asp, Asn or Ser
  MOD_RES (16)...(16): Xaa = Ser, Arg, Gln, Asn, Leu, Lys, Ile, His, Ala or Gly
  MOD_RES (18)...(18): Xaa = Val, Gln, Leu, Lys, Ile or Glu
  MOD_RES (20)...(20): Xaa = Thr, Ser, Leu or Ile
  MOD_RES (21)...(21): Xaa = Val, Gln, Pro, Leu, Glu or Ala
  MOD_RES (23)...(23): Xaa = Ser or Gly
  MOD_RES (24)...(24): Xaa = Thr or Phe
  MOD_RES (25)...(25): Xaa = Ser, Arg, Gln, Lys or His
  MOD_RES (27)...(27): Xaa = Val, Ser, Arg, Gln, Asn, Met, Leu, Lys, Ile, His, Gly, Glu or Asp
  MOD_RES (29)...(29): Xaa = Val, Pro, Leu, Ala, His, Asn, Arg, Ser or Thr
  MOD_RES (30)...(30): Xaa = Gln, Pro, Glu, Ala, Lys or Thr
  MOD_RES (32)...(32): Xaa = Tyr or Phe
  MOD_RES (33)...(33): Xaa = Thr, Ser, Ala, Glu, Lys, Leu, Met, Pro, Gln or Val
  MOD_RES (34)...(34): Xaa = Gly, Leu, Pro, Gln or Arg
  MOD_RES (35)...(35): Xaa = Val, Thr, Gln, Pro, Leu, Lys, Ile, Glu, Ala, Asp, Gly, Asn or Ser
  MOD_RES (36)...(36): Xaa = Ser, Arg, Asn, Leu, Ile, His, Ala, Glu, Gly, Pro or Gln
  MOD_RES (37)...(37): Xaa = Ala, Asp, Asn or Thr
  MOD_RES (38)...(38): Xaa = Gly, Arg or Ser
XDXBECXXXXXCXXXXCXBXXGXXXCXCXXGXXXXXXXC

SEQ ID NO: 549 - protein, 40 aa, Artificial Sequence
  human calcium binding epidermal growth factor (CaEGF) domain
  MOD_RES (1)...(1): Xaa = Val, Thr, Ile, Lys, Glu or Ala
  MOD_RES (3)...(3): Xaa = Val or Ile
  MOD_RES (7)...(7): Xaa = Val, Ser, Leu, Ala, Asp, Glu, Gly, Lys, Asn, Arg or Thr
  MOD_RES (8)...(8): Xaa = Ser, Pro, Glu, Leu, Gln or Val
  MOD_RES (9)...(9): Xaa = Ser, Gly, Asn, Asp, Ile or Val
  MOD_RES (10)...(10): Xaa = Pro, Ala or Ser
  MOD_RES (11)...(11): Xaa = Asp, Gly, His, Asn, Arg or Ser
  MOD_RES (13)...(13): Xaa = Val, Thr, Ser, Arg, Gln, Pro, Asn, Met, Leu, Lys, Ile, His, Gly, Glu, Asp or Ala
  MOD_RES (14)...(14): Xaa = Ser, Arg, Asn or His
  MOD_RES (15)...(15): Xaa = Gly, Asp, Asn or Ser
  MOD_RES (16)...(16): Xaa = Ser, Arg, Gln, Asn, Leu, Lys, Ile, His, Ala or Gly
  MOD_RES (18)...(18): Xaa = Val, Gln, Leu, Lys, Ile or Glu
  MOD_RES (20)...(20): Xaa = Thr, Ser, Leu or Ile
  MOD_RES (21)...(21): Xaa = Val, Gln, Pro, Leu, Glu or Ala
  MOD_RES (23)...(23): Xaa = Ser or Gly
  MOD_RES (24)...(24): Xaa = Thr or Phe
  MOD_RES (25)...(25): Xaa = Ser, Arg, Gln, Lys or His
  MOD_RES (27)...(27): Xaa = Val, Ser, Arg, Gln, Asn, Met, Leu, Lys, Ile, His, Gly, Glu or Asp
  MOD_RES (29)...(29): Xaa = Val, Pro, Leu, Ala, His, Asn, Arg, Ser or Thr
  MOD_RES (30)...(30): Xaa = Gln, Pro, Glu, Ala, Lys or Thr
  MOD_RES (32)...(32): Xaa = Tyr or Phe
  MOD_RES (33)...(33): Xaa = Thr, Ser, Ala, Glu, Lys, Leu, Met, Pro, Gln or Val
  MOD_RES (34)...(34): Xaa = Gly, Leu, Pro, Gln or Arg
  MOD_RES (35)...(35): Xaa = Val, Thr, Gln, Pro, Leu, Lys, Ile, Glu, Ala, Asp, Gly, Asn or Ser
  MOD_RES (36)...(36): Xaa = Ser, Arg, Asn, Leu, Ile, His, Ala, Glu, Gly, Pro or Gln
  MOD_RES (37)...(37): Xaa = Ala, Asp, Asn or Thr
  MOD_RES (38)...(38): Xaa = Gly, Arg or Ser
  MOD_RES (39)...(39): Xaa = Lys, Asn, Arg, Ser or Thr
XDXBECXXXXXCXXXXCXBXXGXXXCXCXXGXXXXXXXXC

SEQ ID NO: 550 - protein, 41 aa, Artificial Sequence
  human calcium binding epidermal growth factor (CaEGF) domain
  MOD_RES (1)...(1): Xaa = Val, Thr, Ile, Lys, Glu or Ala
  MOD_RES (3)...(3): Xaa = Val or Ile
  MOD_RES (7)...(7): Xaa = Val, Ser, Leu, Ala, Asp, Glu, Gly, Lys, Asn, Arg or Thr
  MOD_RES (8)...(8): Xaa = Ser, Pro, Glu, Leu, Gln or Val
  MOD_RES (9)...(9): Xaa = Ser, Gly, Asn, Asp, Ile or Val
  MOD_RES (10)...(10): Xaa = Pro, Ala or Ser
  MOD_RES (11)...(11): Xaa = Asp, Gly, His, Asn, Arg or Ser
  MOD_RES (13)...(13): Xaa = Val, Thr, Ser, Arg, Gln, Pro, Asn, Met, Leu, Lys, Ile, His, Gly, Glu, Asp or Ala
  MOD_RES (14)...(14): Xaa = Ser, Arg, Asn or His
  MOD_RES (15)...(15): Xaa = Gly, Asp, Asn or Ser
  MOD_RES (16)...(16): Xaa = Ser, Arg, Gln, Asn, Leu, Lys, Ile, His, Ala or Gly
  MOD_RES (18)...(18): Xaa = Val, Gln, Leu, Lys, Ile or Glu
  MOD_RES (20)...(20): Xaa = Thr, Ser, Leu or Ile
  MOD_RES (21)...(21): Xaa = Val, Gln, Pro, Leu, Glu or Ala
  MOD_RES (23)...(23): Xaa = Ser or Gly
  MOD_RES (24)...(24): Xaa = Thr or Phe
  MOD_RES (25)...(25): Xaa = Ser, Arg, Gln, Lys or His
  MOD_RES (27)...(27): Xaa = Val, Ser, Arg, Gln, Asn, Met, Leu, Lys, Ile, His, Gly, Glu or Asp
  MOD_RES (29)...(29): Xaa = Val, Pro, Leu, Ala, His, Asn, Arg, Ser or Thr
  MOD_RES (30)...(30): Xaa = Gln, Pro, Glu, Ala, Lys or Thr
  MOD_RES (32)...(32): Xaa = Tyr or Phe
  MOD_RES (33)...(33): Xaa = Thr, Ser, Ala, Glu, Lys, Leu, Met, Pro, Gln or Val
  MOD_RES (34)...(34): Xaa = Gly, Leu, Pro, Gln or Arg
  MOD_RES (35)...(35): Xaa = Val, Thr, Gln, Pro, Leu, Lys, Ile, Glu, Ala, Asp, Gly, Asn or Ser
  MOD_RES (36)...(36): Xaa = Ser, Arg, Asn, Leu, Ile, His, Ala, Glu, Gly, Pro or Gln
  MOD_RES (37)...(37): Xaa = Ala, Asp, Asn or Thr
  MOD_RES (38)...(38): Xaa = Gly, Arg or Ser
  MOD_RES (39)...(39): Xaa = Lys, Asn, Arg, Ser or Thr
  MOD_RES (40)...(40): Xaa = Ala, Asp, Glu, Gly, Lys, Asn, Arg, Ser or Thr
XDXBECXXXXXCXXXXCXBXXGXXXCXCXXGXXXXXXXXXC

SEQ ID NO: 551 - protein, 38 aa, Artificial Sequence
  human calcium binding epidermal growth factor (CaEGF) domain
  MOD_RES (1)...(1): Xaa = Val, Thr, Ile, Lys, Glu or Ala
  MOD_RES (3)...(3): Xaa = Val or Ile
  MOD_RES (7)...(7): Xaa = Val, Ser, Leu, Ala, Asp, Glu, Gly, Lys, Asn, Arg or Thr
  MOD_RES (8)...(8): Xaa = Ser, Pro, Glu, Leu, Gln or Val
  MOD_RES (9)...(9): Xaa = Ser, Gly, Asn, Asp, Ile or Val
  MOD_RES (10)...(10): Xaa = Pro, Ala or Ser
  MOD_RES (11)...(11): Xaa = Asp, Gly, His, Asn, Arg or Ser
  MOD_RES (12)...(12): Xaa = Ala, Ile, Leu, Pro, Thr or Val
  MOD_RES (14)...(14): Xaa = Val, Thr, Ser, Arg, Gln, Pro, Asn, Met, Leu, Lys, Ile, His, Gly, Glu, Asp or Ala
  MOD_RES (15)...(15): Xaa = Ser, Arg, Asn or His
  MOD_RES (16)...(16): Xaa = Gly, Asp, Asn or Ser
  MOD_RES (17)...(17): Xaa = Ser, Arg, Gln, Asn, Leu, Lys, Ile, His, Ala or Gly
  MOD_RES (19)...(19): Xaa = Val, Gln, Leu, Lys, Ile or Glu
  MOD_RES (21)...(21): Xaa = Thr, Ser, Leu or Ile
  MOD_RES (22)...(22): Xaa = Val, Gln, Pro, Leu, Glu or Ala
  MOD_RES (24)...(24): Xaa = Ser or Gly
  MOD_RES (25)...(25): Xaa = Thr or Phe
  MOD_RES (26)...(26): Xaa = Ser, Arg, Gln, Lys or His
  MOD_RES (28)...(28): Xaa = Val, Ser, Arg, Gln, Asn, Met, Leu, Lys, Ile, His, Gly, Glu or Asp
  MOD_RES (30)...(30): Xaa = Val, Pro, Leu, Ala, His, Asn, Arg, Ser or Thr
  MOD_RES (31)...(31): Xaa = Gln, Pro, Glu, Ala, Lys or Thr
  MOD_RES (33)...(33): Xaa = Tyr or Phe
  MOD_RES (34)...(34): Xaa = Thr, Ser, Ala, Glu, Lys, Leu, Met, Pro, Gln or Val
  MOD_RES (35)...(35): Xaa = Gly, Leu, Pro, Gln or Arg
  MOD_RES (36)...(36): Xaa = Val, Thr, Gln, Pro, Leu, Lys, Ile, Glu, Ala, Asp, Gly, Asn or Ser
  MOD_RES (37)...(37): Xaa = Ser, Arg, Asn, Leu, Ile, His, Ala, Glu, Gly, Pro or Gln
XDXBECXXXXXXCXXXXCXBXXGXXXCXCXXGXXXXXC

SEQ ID NO: 552 - protein, 39 aa, Artificial Sequence
  human calcium binding epidermal growth factor (CaEGF) domain
  MOD_RES (1)...(1): Xaa = Val, Thr, Ile, Lys, Glu or Ala
  MOD_RES (3)...(3): Xaa = Val or Ile
  MOD_RES (7)...(7): Xaa = Val, Ser, Leu, Ala, Asp, Glu, Gly, Lys, Asn, Arg or Thr
  MOD_RES (8)...(8): Xaa = Ser, Pro, Glu, Leu, Gln or Val
  MOD_RES (9)...(9): Xaa = Ser, Gly, Asn, Asp, Ile or Val
  MOD_RES (10)...(10): Xaa = Pro, Ala or Ser
  MOD_RES (11)...(11): Xaa = Asp, Gly, His, Asn, Arg or Ser
  MOD_RES (12)...(12): Xaa = Ala, Ile, Leu, Pro, Thr or Val
  MOD_RES (14)...(14): Xaa = Val, Thr, Ser, Arg, Gln, Pro, Asn, Met, Leu, Lys, Ile, His, Gly, Glu, Asp or Ala
  MOD_RES (15)...(15): Xaa = Ser, Arg, Asn or His
  MOD_RES (16)...(16): Xaa = Gly, Asp, Asn or Ser
  MOD_RES (17)...(17): Xaa = Ser, Arg, Gln, Asn, Leu, Lys, Ile, His, Ala or Gly
  MOD_RES (19)...(19): Xaa = Val, Gln, Leu, Lys, Ile or Glu
  MOD_RES (21)...(21): Xaa = Thr, Ser, Leu or Ile
  MOD_RES (22)...(22): Xaa = Val, Gln, Pro, Leu, Glu or Ala
  MOD_RES (24)...(24): Xaa = Ser or Gly
  MOD_RES (25)...(25): Xaa = Thr or Phe
  MOD_RES (26)...(26): Xaa = Ser, Arg, Gln, Lys or His
  MOD_RES (28)...(28): Xaa = Val, Ser, Arg, Gln, Asn, Met, Leu, Lys, Ile, His, Gly, Glu or Asp
  MOD_RES (30)...(30): Xaa = Val, Pro, Leu, Ala, His, Asn, Arg, Ser or Thr
  MOD_RES (31)...(31): Xaa = Gln, Pro, Glu, Ala, Lys or Thr
  MOD_RES (33)...(33): Xaa = Tyr or Phe
  MOD_RES (34)...(34): Xaa = Thr, Ser, Ala, Glu, Lys, Leu, Met, Pro, Gln or Val
  MOD_RES (35)...(35): Xaa = Gly, Leu, Pro, Gln or Arg
  MOD_RES (36)...(36): Xaa = Val, Thr, Gln, Pro, Leu, Lys, Ile, Glu, Ala, Asp, Gly, Asn or Ser
  MOD_RES (37)...(37): Xaa = Ser, Arg, Asn, Leu, Ile, His, Ala, Glu, Gly, Pro or Gln
  MOD_RES (38)...(38): Xaa = Ala, Asp, Asn or Thr
XDXBECXXXXXXCXXXXCXBXXGXXXCXCXXGXXXXXXC

SEQ ID NO: 553 - protein, 40 aa, Artificial Sequence
  human calcium binding epidermal growth factor (CaEGF) domain
  MOD_RES (1)...(1): Xaa = Val, Thr, Ile, Lys, Glu or Ala
  MOD_RES (3)...(3): Xaa = Val or Ile
  MOD_RES (7)...(7): Xaa = Val, Ser, Leu, Ala, Asp, Glu, Gly, Lys, Asn, Arg or Thr
  MOD_RES (8)...(8): Xaa = Ser, Pro, Glu, Leu, Gln or Val
  MOD_RES (9)...(9): Xaa = Ser, Gly, Asn, Asp, Ile or Val
  MOD_RES (10)...(10): Xaa = Pro, Ala or Ser
  MOD_RES (11)...(11): Xaa = Asp, Gly, His, Asn, Arg or Ser
  MOD_RES (12)...(12): Xaa = Ala, Ile, Leu, Pro, Thr or Val
  MOD_RES (14)...(14): Xaa = Val, Thr, Ser, Arg, Gln, Pro, Asn, Met, Leu, Lys, Ile, His, Gly, Glu, Asp or Ala
  MOD_RES (15)...(15): Xaa = Ser, Arg, Asn or His
  MOD_RES (16)...(16): Xaa = Gly, Asp, Asn or Ser
  MOD_RES (17)...(17): Xaa = Ser, Arg, Gln, Asn, Leu, Lys, Ile, His, Ala or Gly
  MOD_RES (19)...(19): Xaa = Val, Gln, Leu, Lys, Ile or Glu
  MOD_RES (21)...(21): Xaa = Thr, Ser, Leu or Ile
  MOD_RES (22)...(22): Xaa = Val, Gln, Pro, Leu, Glu or Ala
  MOD_RES (24)...(24): Xaa = Ser or Gly
  MOD_RES (25)...(25): Xaa = Thr or Phe
  MOD_RES (26)...(26): Xaa = Ser, Arg, Gln, Lys or His
  MOD_RES (28)...(28): Xaa = Val, Ser, Arg, Gln, Asn, Met, Leu, Lys, Ile, His, Gly, Glu or Asp
  MOD_RES (30)...(30): Xaa = Val, Pro, Leu, Ala, His, Asn, Arg, Ser or Thr
  MOD_RES (31)...(31): Xaa = Gln, Pro, Glu, Ala, Lys or Thr
  MOD_RES (33)...(33): Xaa = Tyr or Phe
  MOD_RES (34)...(34): Xaa = Thr, Ser, Ala, Glu, Lys, Leu, Met, Pro, Gln or Val
  MOD_RES (35)...(35): Xaa = Gly, Leu, Pro, Gln or Arg
  MOD_RES (36)...(36): Xaa = Val, Thr, Gln, Pro, Leu, Lys, Ile, Glu, Ala, Asp, Gly, Asn or Ser
  MOD_RES (37)...(37): Xaa = Ser, Arg, Asn, Leu, Ile, His, Ala, Glu, Gly, Pro or Gln
  MOD_RES (38)...(38): Xaa = Ala, Asp, Asn or Thr
  MOD_RES (39)...(39): Xaa = Gly, Arg or Ser
XDXBECXXXXXXCXXXXCXBXXGXXXCXCXXGXXXXXXXC

SEQ ID NO: 554 - protein, 41 aa, Artificial Sequence
  human calcium binding epidermal growth factor (CaEGF) domain
  MOD_RES (1)...(1): Xaa = Val, Thr, Ile, Lys, Glu or Ala
  MOD_RES (3)...(3): Xaa = Val or Ile
  MOD_RES (7)...(7): Xaa = Val, Ser, Leu, Ala, Asp, Glu, Gly, Lys, Asn, Arg or Thr
  MOD_RES (8)...(8): Xaa = Ser, Pro, Glu, Leu, Gln or Val
  MOD_RES (9)...(9): Xaa = Ser, Gly, Asn, Asp, Ile or Val
  MOD_RES (10)...(10): Xaa = Pro, Ala or Ser
  MOD_RES (11)...(11): Xaa = Asp, Gly, His, Asn, Arg or Ser
  MOD_RES (12)...(12): Xaa = Ala, Ile, Leu, Pro, Thr or Val
  MOD_RES (14)...(14): Xaa = Val, Thr, Ser, Arg, Gln, Pro, Asn, Met, Leu, Lys, Ile, His, Gly, Glu, Asp or Ala
  MOD_RES (15)...(15): Xaa = Ser, Arg, Asn or His
  MOD_RES (16)...(16): Xaa = Gly, Asp, Asn or Ser
  MOD_RES (17)...(17): Xaa = Ser, Arg, Gln, Asn, Leu, Lys, Ile, His, Ala or Gly
  MOD_RES (19)...(19): Xaa = Val, Gln, Leu, Lys, Ile or Glu
  MOD_RES (21)...(21): Xaa = Thr, Ser, Leu or Ile
  MOD_RES (22)...(22): Xaa = Val, Gln, Pro, Leu, Glu or Ala
  MOD_RES (24)...(24): Xaa = Ser or Gly
  MOD_RES (25)...(25): Xaa = Thr or Phe
  MOD_RES (26)...(26): Xaa = Ser, Arg, Gln, Lys or His
  MOD_RES (28)...(28): Xaa = Val, Ser, Arg, Gln, Asn, Met, Leu, Lys, Ile, His, Gly, Glu or Asp
  MOD_RES (30)...(30): Xaa = Val, Pro, Leu, Ala, His, Asn, Arg, Ser or Thr
  MOD_RES (31)...(31): Xaa = Gln, Pro, Glu, Ala, Lys or Thr
  MOD_RES (33)...(33): Xaa = Tyr or Phe
  MOD_RES (34)...(34): Xaa = Thr, Ser, Ala, Glu, Lys, Leu, Met, Pro, Gln or Val
  MOD_RES (35)...(35): Xaa = Gly, Leu, Pro, Gln or Arg
  MOD_RES (36)...(36): Xaa = Val, Thr, Gln, Pro, Leu, Lys, Ile, Glu, Ala, Asp, Gly, Asn or Ser
  MOD_RES (37)...(37): Xaa = Ser, Arg, Asn, Leu, Ile, His, Ala, Glu, Gly, Pro or Gln
  MOD_RES (38)...(38): Xaa = Ala, Asp, Asn or Thr
  MOD_RES (39)...(39): Xaa = Gly, Arg or Ser
  MOD_RES (40)...(40): Xaa = Lys, Asn, Arg, Ser or Thr
XDXBECXXXXXXCXXXXCXBXXGXXXCXCXXGXXXXXXXXC

SEQ ID NO: 555 - protein, 42 aa, Artificial Sequence
  human calcium binding epidermal growth factor (CaEGF) domain
  MOD_RES (1)...(1): Xaa = Val, Thr, Ile, Lys, Glu or Ala
  MOD_RES (3)...(3): Xaa = Val or Ile
  MOD_RES (7)...(7): Xaa = Val, Ser, Leu, Ala, Asp, Glu, Gly, Lys, Asn, Arg or Thr
  MOD_RES (8)...(8): Xaa = Ser, Pro, Glu, Leu, Gln or Val
  MOD_RES (9)...(9): Xaa = Ser, Gly, Asn, Asp, Ile or Val
  MOD_RES (10)...(10): Xaa = Pro, Ala or Ser
  MOD_RES (11)...(11): Xaa = Asp, Gly, His, Asn, Arg or Ser
  MOD_RES (12)...(12): Xaa = Ala, Ile, Leu, Pro, Thr or Val
  MOD_RES (14)...(14): Xaa = Val, Thr, Ser, Arg, Gln, Pro, Asn, Met, Leu, Lys, Ile, His, Gly, Glu, Asp or Ala
  MOD_RES (15)...(15): Xaa = Ser, Arg, Asn or His
  MOD_RES (16)...(16): Xaa = Gly, Asp, Asn or Ser
  MOD_RES (17)...(17): Xaa = Ser, Arg, Gln, Asn, Leu, Lys, Ile, His, Ala or Gly
  MOD_RES (19)...(19): Xaa = Val, Gln, Leu, Lys, Ile or Glu
  MOD_RES (21)...(21): Xaa = Thr, Ser, Leu or Ile
  MOD_RES (22)...(22): Xaa = Val, Gln, Pro, Leu, Glu or Ala
  MOD_RES (24)...(24): Xaa = Ser or Gly
  MOD_RES (25)...(25): Xaa = Thr or Phe
  MOD_RES (26)...(26): Xaa = Ser, Arg, Gln, Lys or His
  MOD_RES (28)...(28): Xaa = Val, Ser, Arg, Gln, Asn, Met, Leu, Lys, Ile, His, Gly, Glu or Asp
  MOD_RES (30)...(30): Xaa = Val, Pro, Leu, Ala, His, Asn, Arg, Ser or Thr
  MOD_RES (31)...(31): Xaa = Gln, Pro, Glu, Ala, Lys or Thr
  MOD_RES (33)...(33): Xaa = Tyr or Phe
  MOD_RES (34)...(34): Xaa = Thr, Ser, Ala, Glu, Lys, Leu, Met, Pro, Gln or Val
  MOD_RES (35)...(35): Xaa = Gly, Leu, Pro, Gln or Arg
  MOD_RES (36)...(36): Xaa = Val, Thr, Gln, Pro, Leu, Lys, Ile, Glu, Ala, Asp, Gly, Asn or Ser
  MOD_RES (37)...(37): Xaa = Ser, Arg, Asn, Leu, Ile, His, Ala, Glu, Gly, Pro or Gln
  MOD_RES (38)...(38): Xaa = Ala, Asp, Asn or Thr
  MOD_RES (39)...(39): Xaa = Gly, Arg or Ser
  MOD_RES (40)...(40): Xaa = Lys, Asn, Arg, Ser or Thr
  MOD_RES (41)...(41): Xaa = Ala, Asp, Glu, Gly, Lys, Asn, Arg, Ser or Thr
XDXBECXXXXXXCXXXXCXBXXGXXXCXCXXGXXXXXXXXXC

SEQ ID NO: 556 - protein, 37 aa, Artificial Sequence
  human calcium binding epidermal growth factor (CaEGF) domain
  MOD_RES (1)...(1): Xaa = Val, Thr, Ile, Lys, Glu or Ala
  MOD_RES (3)...(3): Xaa = Val or Ile
  MOD_RES (7)...(7): Xaa = Val, Ser, Leu, Ala, Asp, Glu, Gly, Lys, Asn, Arg or Thr
  MOD_RES (8)...(8): Xaa = Ser, Pro, Glu, Leu, Gln or Val
  MOD_RES (9)...(9): Xaa = Ser, Gly, Asn, Asp, Ile or Val
  MOD_RES (10)...(10): Xaa = Pro, Ala or Ser
  MOD_RES (12)...(12): Xaa = Val, Thr, Ser, Arg, Gln, Pro, Asn, Met, Leu, Lys, Ile, His, Gly, Glu, Asp or Ala
  MOD_RES (13)...(13): Xaa = Ser, Pro, Glu, Leu, Gln or Val
  MOD_RES (14)...(14): Xaa = Gly, Asp, Asn or Ser
  MOD_RES (15)...(15): Xaa = Ser, Arg, Gln, Asn, Leu, Lys, Ile, His, Ala or Gly
  MOD_RES (16)...(16): Xaa = Ile, Lys, Asn, Arg, Ser or Thr
  MOD_RES (18)...(18): Xaa = Val, Gln, Leu, Lys, Ile or Glu
  MOD_RES (20)...(20): Xaa = Thr, Ser, Leu or Ile
  MOD_RES (21)...(21): Xaa = Val, Gln, Pro, Leu, Glu or Ala
  MOD_RES (23)...(23): Xaa = Ser or Gly
  MOD_RES (24)...(24): Xaa = Thr or Phe
  MOD_RES (25)...(25): Xaa = Ser, Arg, Gln, Lys or His
  MOD_RES (27)...(27): Xaa = Val, Ser, Arg, Gln, Asn, Met, Leu, Lys, Ile, His, Gly, Glu or Asp
  MOD_RES (29)...(29): Xaa = Val, Pro, Leu, Ala, His, Asn, Arg, Ser or Thr
  MOD_RES (30)...(30): Xaa = Gln, Pro, Glu, Ala, Lys or Thr
  MOD_RES (32)...(32): Xaa = Tyr or Phe
  MOD_RES (33)...(33): Xaa = Thr, Ser, Ala, Glu, Lys, Leu, Met, Pro, Gln or Val
  MOD_RES (34)...(34): Xaa = Gly, Leu, Pro, Gln or Arg
  MOD_RES (35)...(35): Xaa = Val, Thr, Gln, Pro, Leu, Lys, Ile, Glu, Ala, Asp, Gly, Asn or Ser
  MOD_RES (36)...(36): Xaa = Ser, Arg, Asn, Leu, Ile, His, Ala, Glu, Gly, Pro or Gln
XDXBECXXXXCXXXXXCXBXXGXXXCXCXXGXXXXXC

SEQ ID NO: 557 - protein, 38 aa, Artificial Sequence
  human calcium binding epidermal growth factor (CaEGF) domain
  MOD_RES (1)...(1): Xaa = Val, Thr, Ile, Lys, Glu or Ala
  MOD_RES (3)...(3): Xaa = Val or Ile
  MOD_RES (7)...(7): Xaa = Val, Ser, Leu, Ala, Asp, Glu, Gly, Lys, Asn, Arg or Thr
  MOD_RES (8)...(8): Xaa = Ser, Pro, Glu, Leu, Gln or Val
  MOD_RES (9)...(9): Xaa = Ser, Gly, Asn, Asp, Ile or Val
  MOD_RES (10)...(10): Xaa = Pro, Ala or Ser
  MOD_RES (12)...(12): Xaa = Val, Thr, Ser, Arg, Gln, Pro, Asn, Met, Leu, Lys, Ile, His, Gly, Glu, Asp or Ala
  MOD_RES (13)...(13): Xaa = Ser, Pro, Glu, Leu, Gln or Val
  MOD_RES (14)...(14): Xaa = Gly, Asp, Asn or Ser
  MOD_RES (15)...(15): Xaa = Ser, Arg, Gln, Asn, Leu, Lys, Ile, His, Ala or Gly
  MOD_RES (16)...(16): Xaa = Ile, Lys, Asn, Arg, Ser or Thr
  MOD_RES (18)...(18): Xaa = Val, Gln, Leu, Lys, Ile or Glu
  MOD_RES (20)...(20): Xaa = Thr, Ser, Leu or Ile
  MOD_RES (21)...(21): Xaa = Val, Gln, Pro, Leu, Glu or Ala
  MOD_RES (23)...(23): Xaa = Ser or Gly
  MOD_RES (24)...(24): Xaa = Thr or Phe
  MOD_RES (25)...(25): Xaa = Ser, Arg, Gln, Lys or His
  MOD_RES (27)...(27): Xaa = Val, Ser, Arg, Gln, Asn, Met, Leu, Lys, Ile, His, Gly, Glu or Asp
  MOD_RES (29)...(29): Xaa = Val, Pro, Leu, Ala, His, Asn, Arg, Ser or Thr
  MOD_RES (30)...(30): Xaa = Gln, Pro, Glu, Ala, Lys or Thr
  MOD_RES (32)...(32): Xaa = Tyr or Phe
  MOD_RES (33)...(33): Xaa = Thr, Ser, Ala, Glu, Lys, Leu, Met, Pro, Gln or Val
  MOD_RES (34)...(34): Xaa = Gly, Leu, Pro, Gln or Arg
  MOD_RES (35)...(35): Xaa = Val, Thr, Gln, Pro, Leu, Lys, Ile, Glu, Ala, Asp, Gly, Asn or Ser
  MOD_RES (36)...(36): Xaa = Ser, Arg, Asn, Leu, Ile, His, Ala, Glu, Gly, Pro or Gln
  MOD_RES (37)...(37): Xaa = Ala, Asp, Asn or Thr
XDXBECXXXXCXXXXXCXBXXGXXXCXCXXGXXXXXXC

SEQ ID NO: 558 - protein, 39 aa, Artificial Sequence
  human calcium binding epidermal growth factor (CaEGF) domain
  MOD_RES (1)...(1): Xaa = Val, Thr, Ile, Lys, Glu or Ala
  MOD_RES (3)...(3): Xaa = Val or Ile
  MOD_RES (7)...(7): Xaa = Val, Ser, Leu, Ala, Asp, Glu, Gly, Lys, Asn, Arg or Thr
  MOD_RES (8)...(8): Xaa = Ser, Pro, Glu, Leu, Gln or Val
  MOD_RES (9)...(9): Xaa = Ser, Gly, Asn, Asp, Ile or Val
  MOD_RES (10)...(10): Xaa = Pro, Ala or Ser
  MOD_RES (12)...(12): Xaa = Val, Thr, Ser, Arg, Gln, Pro, Asn, Met, Leu, Lys, Ile, His, Gly, Glu, Asp or Ala
  MOD_RES (13)...(13): Xaa = Ser, Pro, Glu, Leu, Gln or Val
  MOD_RES (14)...(14): Xaa = Gly, Asp, Asn or Ser
  MOD_RES (15)...(15): Xaa = Ser, Arg, Gln, Asn, Leu, Lys, Ile, His, Ala or Gly
  MOD_RES (16)...(16): Xaa = Ile, Lys, Asn, Arg, Ser or Thr
  MOD_RES (18)...(18): Xaa = Val, Gln, Leu, Lys, Ile or Glu
  MOD_RES (20)...(20): Xaa = Thr, Ser, Leu or Ile
  MOD_RES (21)...(21): Xaa = Val, Gln, Pro, Leu, Glu or Ala
  MOD_RES (23)...(23): Xaa = Ser or Gly
  MOD_RES (24)...(24): Xaa = Thr or Phe
  MOD_RES (25)...(25): Xaa = Ser, Arg, Gln, Lys or His
  MOD_RES (27)...(27): Xaa = Val, Ser, Arg, Gln, Asn, Met, Leu, Lys, Ile, His, Gly, Glu or Asp
  MOD_RES (29)...(29): Xaa = Val, Pro, Leu, Ala, His, Asn, Arg, Ser or Thr
  MOD_RES (30)...(30): Xaa = Gln, Pro, Glu, Ala, Lys or Thr
  MOD_RES (32)...(32): Xaa = Tyr or Phe
  MOD_RES (33)...(33): Xaa = Thr, Ser, Ala, Glu, Lys, Leu, Met, Pro, Gln or Val
  MOD_RES (34)...(34): Xaa = Gly, Leu, Pro, Gln or Arg
  MOD_RES (35)...(35): Xaa = Val, Thr, Gln, Pro, Leu, Lys, Ile, Glu, Ala, Asp, Gly, Asn or Ser
  MOD_RES (36)...(36): Xaa = Ser, Arg, Asn, Leu, Ile, His, Ala, Glu, Gly, Pro or Gln
  MOD_RES (37)...(37): Xaa = Ala, Asp, Asn or Thr
  MOD_RES (38)...(38): Xaa = Gly, Arg or Ser
XDXBECXXXXCXXXXXCXBXXGXXXCXCXXGXXXXXXXC

SEQ ID NO: 559 - protein, 40 aa, Artificial Sequence
  human calcium binding epidermal growth factor (CaEGF) domain
  MOD_RES (1)...(1): Xaa = Val, Thr, Ile, Lys, Glu or Ala
  MOD_RES (3)...(3): Xaa = Val or Ile
  MOD_RES (7)...(7): Xaa = Val, Ser, Leu, Ala, Asp, Glu, Gly, Lys, Asn, Arg or Thr
  MOD_RES (8)...(8): Xaa = Ser, Pro, Glu, Leu, Gln or Val
  MOD_RES (9)...(9): Xaa = Ser, Gly, Asn, Asp, Ile or Val
  MOD_RES (10)...(10): Xaa = Pro, Ala or Ser
  MOD_RES (12)...(12): Xaa = Val, Thr, Ser, Arg, Gln, Pro, Asn, Met, Leu, Lys, Ile, His, Gly, Glu, Asp or Ala
  MOD_RES (13)...(13): Xaa = Ser, Pro, Glu, Leu, Gln or Val
  MOD_RES (14)...(14): Xaa = Gly, Asp, Asn or Ser
  MOD_RES (15)...(15): Xaa = Ser, Arg, Gln, Asn, Leu, Lys, Ile, His, Ala or Gly
  MOD_RES (16)...(16): Xaa = Ile, Lys, Asn, Arg, Ser or Thr
  MOD_RES (18)...(18): Xaa = Val, Gln, Leu, Lys, Ile or Glu
  MOD_RES (20)...(20): Xaa = Thr, Ser, Leu or Ile
  MOD_RES (21)...(21): Xaa = Val, Gln, Pro, Leu, Glu or Ala
  MOD_RES (23)...(23): Xaa = Ser or Gly
  MOD_RES (24)...(24): Xaa = Thr or Phe
  MOD_RES (25)...(25): Xaa = Ser, Arg, Gln, Lys or His
  MOD_RES (27)...(27): Xaa = Val, Ser, Arg, Gln, Asn, Met, Leu, Lys, Ile, His, Gly, Glu or Asp
  MOD_RES (29)...(29): Xaa = Val, Pro, Leu, Ala, His, Asn, Arg, Ser or Thr
  MOD_RES (30)...(30): Xaa = Gln, Pro, Glu, Ala, Lys or Thr
  MOD_RES (32)...(32): Xaa = Tyr or Phe
  MOD_RES (33)...(33): Xaa = Thr, Ser, Ala, Glu, Lys, Leu, Met, Pro, Gln or Val
  MOD_RES (34)...(34): Xaa = Gly, Leu, Pro, Gln or Arg
  MOD_RES (35)...(35): Xaa = Val, Thr, Gln, Pro, Leu, Lys, Ile, Glu, Ala, Asp, Gly, Asn or Ser
  MOD_RES (36)...(36): Xaa = Ser, Arg, Asn, Leu, Ile, His, Ala, Glu, Gly, Pro or Gln
  MOD_RES (37)...(37): Xaa = Ala, Asp, Asn or Thr
  MOD_RES (38)...(38): Xaa = Gly, Arg or Ser
  MOD_RES (39)...(39): Xaa = Lys, Asn, Arg, Ser or Thr
XDXBECXXXXCXXXXXCXBXXGXXXCXCXXGXXXXXXXXC

SEQ ID NO: 560 - protein, 41 aa, Artificial Sequence
  human calcium binding epidermal growth factor (CaEGF) domain
  MOD_RES (1)...(1): Xaa = Val, Thr, Ile, Lys, Glu or Ala
  MOD_RES (3)...(3): Xaa = Val or Ile
  MOD_RES (7)...(7): Xaa = Val, Ser, Leu, Ala, Asp, Glu, Gly, Lys, Asn, Arg or Thr
  MOD_RES (8)...(8): Xaa = Ser, Pro, Glu, Leu, Gln or Val
  MOD_RES (9)...(9): Xaa = Ser, Gly, Asn, Asp, Ile or Val
  MOD_RES (10)...(10): Xaa = Pro, Ala or Ser
  MOD_RES (12)...(12): Xaa = Val, Thr, Ser, Arg, Gln, Pro, Asn, Met, Leu, Lys, Ile, His, Gly, Glu, Asp or Ala
  MOD_RES (13)...(13): Xaa = Ser, Pro, Glu, Leu, Gln or Val
  MOD_RES (14)...(14): Xaa = Gly, Asp, Asn or Ser
  MOD_RES (15)...(15): Xaa = Ser, Arg, Gln, Asn, Leu, Lys, Ile, His, Ala or Gly
  MOD_RES (16)...(16): Xaa = Ile, Lys, Asn, Arg, Ser or Thr
  MOD_RES (18)...(18): Xaa = Val, Gln, Leu, Lys, Ile or Glu
  MOD_RES (20)...(20): Xaa = Thr, Ser, Leu or Ile
  MOD_RES (21)...(21): Xaa = Val, Gln, Pro, Leu, Glu or Ala
  MOD_RES (23)...(23): Xaa = Ser or Gly
  MOD_RES (24)...(24): Xaa = Thr or Phe
  MOD_RES (25)...(25): Xaa = Ser, Arg, Gln, Lys or His
  MOD_RES (27)...(27): Xaa = Val, Ser, Arg, Gln, Asn, Met, Leu, Lys, Ile, His, Gly, Glu or Asp
  MOD_RES (29)...(29): Xaa = Val, Pro, Leu, Ala, His, Asn, Arg, Ser or Thr
  MOD_RES (30)...(30): Xaa = Gln, Pro, Glu, Ala, Lys or Thr
  MOD_RES (32)...(32): Xaa = Tyr or Phe
  MOD_RES (33)...(33): Xaa = Thr, Ser, Ala, Glu, Lys, Leu, Met, Pro, Gln or Val
  MOD_RES (34)...(34): Xaa = Gly, Leu, Pro, Gln or Arg
  MOD_RES (35)...(35): Xaa = Val, Thr, Gln, Pro, Leu, Lys, Ile, Glu, Ala, Asp, Gly, Asn or Ser
  MOD_RES (36)...(36): Xaa = Ser, Arg, Asn, Leu, Ile, His, Ala, Glu, Gly, Pro or Gln
  MOD_RES (37)...(37): Xaa = Ala, Asp, Asn or Thr
  MOD_RES (38)...(38): Xaa = Gly, Arg or Ser
  MOD_RES (39)...(39): Xaa = Lys, Asn, Arg, Ser or Thr
  MOD_RES (40)...(40): Xaa = Ala, Asp, Glu, Gly, Lys, Asn, Arg, Ser or Thr
XDXBECXXXXCXXXXXCXBXXGXXXCXCXXGXXXXXXXXXC

SEQ ID NO: 561 - protein, 38 aa, Artificial Sequence
  human calcium binding epidermal growth factor (CaEGF) domain
  MOD_RES (1)...(1): Xaa = Val, Thr, Ile, Lys, Glu or Ala
  MOD_RES (3)...(3): Xaa = Val or Ile
  MOD_RES (7)...(7): Xaa = Val, Ser, Leu, Ala, Asp, Glu, Gly, Lys, Asn, Arg or Thr
  MOD_RES (8)...(8): Xaa = Ser, Pro, Glu, Leu, Gln or Val
  MOD_RES (9)...(9): Xaa = Ser, Gly, Asn, Asp, Ile or Val
  MOD_RES (10)...(10): Xaa = Pro, Ala or Ser
  MOD_RES (11)...(11): Xaa = Asp, Gly, His, Asn, Arg or Ser
  MOD_RES (13)...(13): Xaa = Val, Thr, Ser, Arg, Gln, Pro, Asn, Met, Leu, Lys, Ile, His, Gly, Glu, Asp or Ala
  MOD_RES (14)...(14): Xaa = Ser, Arg, Asn or His
  MOD_RES (15)...(15): Xaa = Gly, Asp, Asn or Ser
  MOD_RES (16)...(16): Xaa = Ser, Arg, Gln, Asn, Leu, Lys, Ile, His, Ala or Gly
  MOD_RES (17)...(17): Xaa = Ile, Lys, Asn, Arg, Ser or Thr
  MOD_RES (19)...(19): Xaa = Val, Gln, Leu, Lys, Ile or Glu
  MOD_RES (21)...(21): Xaa = Thr, Ser, Leu or Ile
  MOD_RES (22)...(22): Xaa = Val, Gln, Pro, Leu, Glu or Ala
  MOD_RES (24)...(24): Xaa = Ser or Gly
  MOD_RES (25)...(25): Xaa = Thr or Phe
  MOD_RES (26)...(26): Xaa = Ser, Arg, Gln, Lys or His
  MOD_RES (28)...(28): Xaa = Val, Ser, Arg, Gln, Asn, Met, Leu, Lys, Ile, His, Gly, Glu or Asp
  MOD_RES (30)...(30): Xaa = Val, Pro, Leu, Ala, His, Asn, Arg, Ser or Thr
  MOD_RES (31)...(31): Xaa = Gln, Pro, Glu, Ala, Lys or Thr
  MOD_RES (33)...(33): Xaa = Tyr or Phe
  MOD_RES (34)...(34): Xaa = Thr, Ser, Ala, Glu, Lys, Leu, Met, Pro, Gln or Val
  MOD_RES (35)...(35): Xaa = Gly, Leu, Pro, Gln or Arg
  MOD_RES (36)...(36): Xaa = Val, Thr, Gln, Pro, Leu, Lys, Ile, Glu, Ala, Asp, Gly, Asn or Ser
  MOD_RES (37)...(37): Xaa = Ser, Arg, Asn, Leu, Ile, His, Ala, Glu, Gly, Pro or Gln
XDXBECXXXXXCXXXXXCXBXXGXXXCXCXXGXXXXXC

SEQ ID NO: 562 - protein, 39 aa, Artificial Sequence
  human calcium binding epidermal growth factor (CaEGF) domain
  MOD_RES (1)...(1): Xaa = Val, Thr, Ile, Lys, Glu or Ala
  MOD_RES (3)...(3): Xaa = Val or Ile
  MOD_RES (7)...(7): Xaa = Val, Ser, Leu, Ala, Asp, Glu, Gly, Lys, Asn, Arg or Thr
  MOD_RES (8)...(8): Xaa = Ser, Pro, Glu, Leu, Gln or Val
  MOD_RES (9)...(9): Xaa = Ser, Gly, Asn, Asp, Ile or Val
  MOD_RES (10)...(10): Xaa = Pro, Ala or Ser
  MOD_RES (11)...(11): Xaa = Asp, Gly, His, Asn, Arg or Ser
  MOD_RES (13)...(13): Xaa = Val, Thr, Ser, Arg, Gln, Pro, Asn, Met, Leu, Lys, Ile, His, Gly, Glu, Asp or Ala
  MOD_RES (14)...(14): Xaa = Ser, Arg, Asn or His
  MOD_RES (15)...(15): Xaa = Gly, Asp, Asn or Ser
  MOD_RES (16)...(16): Xaa = Ser, Arg, Gln, Asn, Leu, Lys, Ile, His, Ala or Gly
  MOD_RES (17)...(17): Xaa = Ile, Lys, Asn, Arg, Ser or Thr
  MOD_RES (19)...(19): Xaa = Val, Gln, Leu, Lys, Ile or Glu
  MOD_RES (21)...(21): Xaa = Thr, Ser, Leu or Ile
  MOD_RES (22)...(22): Xaa = Val, Gln, Pro, Leu, Glu or Ala
  MOD_RES (24)...(24): Xaa = Ser or Gly
  MOD_RES (25)...(25): Xaa = Thr or Phe
  MOD_RES (26)...(26): Xaa = Ser, Arg, Gln, Lys or His
  MOD_RES (28)...(28): Xaa = Val, Ser, Arg, Gln, Asn, Met, Leu, Lys, Ile, His, Gly, Glu or Asp
  MOD_RES (30)...(30): Xaa = Val, Pro, Leu, Ala, His, Asn, Arg, Ser or Thr
  MOD_RES (31)...(31): Xaa = Gln, Pro, Glu, Ala, Lys or Thr
  MOD_RES (33)...(33): Xaa = Tyr or Phe
  MOD_RES (34)...(34): Xaa = Thr, Ser, Ala, Glu, Lys, Leu, Met, Pro, Gln or Val
  MOD_RES (35)...(35): Xaa = Gly, Leu, Pro, Gln or Arg
  MOD_RES (36)...(36): Xaa = Val, Thr, Gln, Pro, Leu, Lys, Ile, Glu, Ala, Asp, Gly, Asn or Ser
  MOD_RES (37)...(37): Xaa = Ser, Arg, Asn, Leu, Ile, His, Ala, Glu, Gly, Pro or Gln
  MOD_RES (38)...(38): Xaa = Ala, Asp, Asn or Thr
XDXBECXXXXXCXXXXXCXBXXGXXXCXCXXGXXXXXXC

SEQ ID NO: 563 - protein, 40 aa, Artificial Sequence
  human calcium binding epidermal growth factor (CaEGF) domain
  MOD_RES (1)...(1): Xaa = Val, Thr, Ile, Lys, Glu or Ala
  MOD_RES (3)...(3): Xaa = Val or Ile
  MOD_RES (7)...(7): Xaa = Val, Ser, Leu, Ala, Asp, Glu, Gly, Lys, Asn, Arg or Thr
  MOD_RES (8)...(8): Xaa = Ser, Pro, Glu, Leu, Gln or Val
  MOD_RES (9)...(9): Xaa = Ser, Gly, Asn, Asp, Ile or Val
  MOD_RES (10)...(10): Xaa = Pro, Ala or Ser
  MOD_RES (11)...(11): Xaa = Asp, Gly, His, Asn, Arg or Ser
  MOD_RES (13)...(13): Xaa = Val, Thr, Ser, Arg, Gln, Pro, Asn, Met, Leu, Lys, Ile, His, Gly, Glu, Asp or Ala
  MOD_RES (14)...(14): Xaa = Ser, Arg, Asn or His
  MOD_RES (15)...(15): Xaa = Gly, Asp, Asn or Ser
  MOD_RES (16)...(16): Xaa = Ser, Arg, Gln, Asn, Leu, Lys, Ile, His, Ala or Gly
  MOD_RES (17)...(17): Xaa = Ile, Lys, Asn, Arg, Ser or Thr
  MOD_RES (19)...(19): Xaa = Val, Gln, Leu, Lys, Ile or Glu
  MOD_RES (21)...(21): Xaa = Thr, Ser, Leu or Ile
  MOD_RES (22)...(22): Xaa = Val, Gln, Pro, Leu, Glu or Ala
  MOD_RES (24)...(24): Xaa = Ser or Gly
  MOD_RES (25)...(25): Xaa = Thr or Phe
  MOD_RES (26)...(26): Xaa = Ser, Arg, Gln, Lys or His
  MOD_RES (28)...(28): Xaa = Val, Ser, Arg, Gln, Asn, Met, Leu, Lys, Ile, His, Gly, Glu or Asp
  MOD_RES (30)...(30): Xaa = Val, Pro, Leu, Ala, His, Asn, Arg, Ser or Thr
  MOD_RES (31)...(31): Xaa = Gln, Pro, Glu, Ala, Lys or Thr
  MOD_RES (33)...(33): Xaa = Tyr or Phe
  MOD_RES (34)...(34): Xaa = Thr, Ser, Ala, Glu, Lys, Leu, Met, Pro, Gln or Val
  MOD_RES (35)...(35): Xaa = Gly, Leu, Pro, Gln or Arg
  MOD_RES (36)...(36): Xaa = Val, Thr, Gln, Pro, Leu, Lys, Ile, Glu, Ala, Asp, Gly, Asn or Ser
  MOD_RES (37)...(37): Xaa = Ser, Arg, Asn, Leu, Ile, His, Ala, Glu, Gly, Pro or Gln
  MOD_RES (38)...(38): Xaa = Ala, Asp, Asn or Thr
  MOD_RES (39)...(39): Xaa = Gly, Arg or Ser
XDXBECXXXXXCXXXXXCXBXXGXXXCXCXXGXXXXXXXC

SEQ ID NO: 564 - protein, 41 aa, Artificial Sequence
  human calcium binding epidermal growth factor (CaEGF) domain
  MOD_RES (1)...(1): Xaa = Val, Thr, Ile, Lys, Glu or Ala
  MOD_RES (3)...(3): Xaa = Val or Ile
  MOD_RES (7)...(7): Xaa = Val, Ser, Leu, Ala, Asp, Glu, Gly, Lys, Asn, Arg or Thr
  MOD_RES (8)...(8): Xaa = Ser, Pro, Glu, Leu, Gln or Val
  MOD_RES (9)...(9): Xaa = Ser, Gly, Asn, Asp, Ile or Val
  MOD_RES (10)...(10): Xaa = Pro, Ala or Ser
  MOD_RES (11)...(11): Xaa = Asp, Gly, His, Asn, Arg or Ser
  MOD_RES (13)...(13): Xaa = Val, Thr, Ser, Arg, Gln, Pro, Asn, Met, Leu, Lys, Ile, His, Gly, Glu, Asp or Ala
  MOD_RES (14)...(14): Xaa = Ser, Arg, Asn or His
  MOD_RES (15)...(15): Xaa = Gly, Asp, Asn or Ser
  MOD_RES (16)...(16): Xaa = Ser, Arg, Gln, Asn, Leu, Lys, Ile, His, Ala or Gly
  MOD_RES (17)...(17): Xaa = Ile, Lys, Asn, Arg, Ser or Thr
  MOD_RES (19)...(19): Xaa = Val, Gln, Leu, Lys, Ile or Glu
  MOD_RES (21)...(21): Xaa = Thr, Ser, Leu or Ile
  MOD_RES (22)...(22): Xaa = Val, Gln, Pro, Leu, Glu or Ala
  MOD_RES (24)...(24): Xaa = Ser or Gly
  MOD_RES (25)...(25): Xaa = Thr or Phe
  MOD_RES (26)...(26): Xaa = Ser, Arg, Gln, Lys or His
  MOD_RES (28)...(28): Xaa = Val, Ser, Arg, Gln, Asn, Met, Leu, Lys, Ile, His, Gly, Glu or Asp
  MOD_RES (30)...(30): Xaa = Val, Pro, Leu, Ala, His, Asn, Arg, Ser or Thr
  MOD_RES (31)...(31): Xaa = Gln, Pro, Glu, Ala, Lys or Thr
  MOD_RES (33)...(33): Xaa = Tyr or Phe
  MOD_RES (34)...(34): Xaa = Thr, Ser, Ala, Glu, Lys, Leu, Met, Pro, Gln or Val
  MOD_RES (35)...(35): Xaa = Gly, Leu, Pro, Gln or Arg
  MOD_RES (36)...(36): Xaa = Val, Thr, Gln, Pro, Leu, Lys, Ile, Glu, Ala, Asp, Gly, Asn or Ser
  MOD_RES (37)...(37): Xaa = Ser, Arg, Asn, Leu, Ile, His, Ala, Glu, Gly, Pro or Gln
  MOD_RES (38)...(38): Xaa = Ala, Asp, Asn or Thr
  MOD_RES (39)...(39): Xaa = Gly, Arg or Ser
  MOD_RES (40)...(40): Xaa = Lys, Asn, Arg, Ser or Thr
XDXBECXXXXXCXXXXXCXBXXGXXXCXCXXGXXXXXXXXC

SEQ ID NO: 565 - protein, 42 aa, Artificial Sequence
  human calcium binding epidermal growth factor (CaEGF) domain
  MOD_RES (1)...(1): Xaa = Val, Thr, Ile, Lys, Glu or Ala
  MOD_RES (3)...(3): Xaa = Val or Ile
  MOD_RES (7)...(7): Xaa = Val, Ser, Leu, Ala, Asp, Glu, Gly, Lys, Asn, Arg or Thr
  MOD_RES (8)...(8): Xaa = Ser, Pro, Glu, Leu, Gln or Val
  MOD_RES (9)...(9): Xaa = Ser, Gly, Asn, Asp, Ile or Val
  MOD_RES (10)...(10): Xaa = Pro, Ala or Ser
  MOD_RES (11)...(11): Xaa = Asp, Gly, His, Asn, Arg or Ser
  MOD_RES (13)...(13): Xaa = Val, Thr, Ser, Arg, Gln, Pro, Asn, Met, Leu, Lys, Ile, His, Gly, Glu, Asp or Ala
  MOD_RES (14)...(14): Xaa = Ser, Arg, Asn or His
  MOD_RES (15)...(15): Xaa = Gly, Asp, Asn or Ser
  MOD_RES (16)...(16): Xaa = Ser, Arg, Gln, Asn, Leu, Lys, Ile, His, Ala or Gly
  MOD_RES (17)...(17): Xaa = Ile, Lys, Asn, Arg, Ser or Thr
  MOD_RES (19)...(19): Xaa = Val, Gln, Leu, Lys, Ile or Glu
  MOD_RES (21)...(21): Xaa = Thr, Ser, Leu or Ile
  MOD_RES (22)...(22): Xaa = Val, Gln, Pro, Leu, Glu or Ala
  MOD_RES (24)...(24): Xaa = Ser or Gly
  MOD_RES (25)...(25): Xaa = Thr or Phe
  MOD_RES (26)...(26): Xaa = Ser, Arg, Gln, Lys or His
  MOD_RES (28)...(28): Xaa = Val, Ser, Arg, Gln, Asn, Met, Leu, Lys, Ile, His, Gly, Glu or Asp
  MOD_RES (30)...(30): Xaa = Val, Pro, Leu, Ala, His, Asn, Arg, Ser or Thr
  MOD_RES (31)...(31): Xaa = Gln, Pro, Glu, Ala, Lys or Thr
  MOD_RES (33)...(33): Xaa = Tyr or Phe
  MOD_RES (34)...(34): Xaa = Thr, Ser, Ala, Glu, Lys, Leu, Met, Pro, Gln or Val
  MOD_RES (35)...(35): Xaa = Gly, Leu, Pro, Gln or Arg
  MOD_RES (36)...(36): Xaa = Val, Thr, Gln, Pro, Leu, Lys, Ile, Glu, Ala, Asp, Gly, Asn or Ser
  MOD_RES (37)...(37): Xaa = Ser, Arg, Asn, Leu, Ile, His, Ala, Glu, Gly, Pro or Gln
  MOD_RES (38)...(38): Xaa = Ala, Asp, Asn or Thr
  MOD_RES (39)...(39): Xaa = Gly, Arg or Ser
  MOD_RES (40)...(40): Xaa = Lys, Asn, Arg, Ser or Thr
  MOD_RES (41)...(41): Xaa = Ala, Asp, Glu, Gly, Lys, Asn, Arg, Ser or Thr
XDXBECXXXXXCXXXXXCXBXXGXXXCXCXXGXXXXXXXXXC

SEQ ID NO: 566 - protein, 39 aa, Artificial Sequence
  human calcium binding epidermal growth factor (CaEGF) domain
  MOD_RES (1)...(1): Xaa = Val, Thr, Ile, Lys, Glu or Ala
  MOD_RES (3)...(3): Xaa = Val or Ile
  MOD_RES (7)...(7): Xaa = Val, Ser, Leu, Ala, Asp, Glu, Gly, Lys, Asn, Arg or Thr
  MOD_RES (8)...(8): Xaa = Ser, Pro, Glu, Leu, Gln or Val
  MOD_RES (9)...(9): Xaa = Ser, Gly, Asn, Asp, Ile or Val
  MOD_RES (10)...(10): Xaa = Pro, Ala or Ser
  MOD_RES (11)...(11): Xaa = Asp, Gly, His, Asn, Arg or Ser
  MOD_RES (12)...(12): Xaa = Ala, Ile, Leu, Pro, Thr or Val
  MOD_RES (14)...(14): Xaa = Val, Thr, Ser, Arg, Gln, Pro, Asn, Met, Leu, Lys, Ile, His, Gly, Glu, Asp or Ala
  MOD_RES (15)...(15): Xaa = Ser, Arg, Asn or His
  MOD_RES (16)...(16): Xaa = Gly, Asp, Asn or Ser
  MOD_RES (17)...(17): Xaa = Ser, Arg, Gln, Asn, Leu, Lys, Ile, His, Ala or Gly
  MOD_RES (18)...(18): Xaa = Ile, Lys, Asn, Arg, Ser or Thr
  MOD_RES (20)...(20): Xaa = Val, Gln, Leu, Lys, Ile or Glu
  MOD_RES (22)...(22): Xaa = Thr, Ser, Leu or Ile
  MOD_RES (23)...(23): Xaa = Val, Gln, Pro, Leu, Glu or Ala
  MOD_RES (25)...(25): Xaa = Ser or Gly
  MOD_RES (26)...(26): Xaa = Thr or Phe
  MOD_RES (27)...(27): Xaa = Ser, Arg, Gln, Lys or His
  MOD_RES (29)...(29): Xaa = Val, Ser, Arg, Gln, Asn, Met, Leu, Lys, Ile, His, Gly, Glu or Asp
  MOD_RES (31)...(31): Xaa = Val, Pro, Leu, Ala, His, Asn, Arg, Ser or Thr
  MOD_RES (32)...(32): Xaa = Gln, Pro, Glu, Ala, Lys or Thr
  MOD_RES (34)...(34): Xaa = Tyr or Phe
  MOD_RES (35)...(35): Xaa = Thr, Ser, Ala, Glu, Lys, Leu, Met, Pro, Gln or Val
  MOD_RES (36)...(36): Xaa = Gly, Leu, Pro, Gln or Arg
  MOD_RES (37)...(37): Xaa = Val, Thr, Gln, Pro, Leu, Lys, Ile, Glu, Ala, Asp, Gly, Asn or Ser
  MOD_RES (38)...(38): Xaa = Ser, Arg, Asn, Leu, Ile, His, Ala, Glu, Gly, Pro or Gln
XDXBECXXXXXXCXXXXXCXBXXGXXXCXCXXGXXXXXC

SEQ ID NO: 567 - protein, 40 aa, Artificial Sequence
  human calcium binding epidermal growth factor (CaEGF) domain
  MOD_RES (1)...(1): Xaa = Val, Thr, Ile, Lys, Glu or Ala
  MOD_RES (3)...(3): Xaa = Val or Ile
  MOD_RES (7)...(7): Xaa = Val, Ser, Leu, Ala, Asp, Glu, Gly, Lys, Asn, Arg or Thr
  MOD_RES (8)...(8): Xaa = Ser, Pro, Glu, Leu, Gln or Val
  MOD_RES (9)...(9): Xaa = Ser, Gly, Asn, Asp, Ile or Val
  MOD_RES (10)...(10): Xaa = Pro, Ala or Ser
  MOD_RES (11)...(11): Xaa = Asp, Gly, His, Asn, Arg or Ser
  MOD_RES (12)...(12): Xaa = Ala, Ile, Leu, Pro, Thr or Val
  MOD_RES (14)...(14): Xaa = Val, Thr, Ser, Arg, Gln, Pro, Asn, Met, Leu, Lys, Ile, His, Gly, Glu, Asp or Ala
  MOD_RES (15)...(15): Xaa = Ser, Arg, Asn or His
  MOD_RES (16)...(16): Xaa = Gly, Asp, Asn or Ser
  MOD_RES (17)...(17): Xaa = Ser, Arg, Gln, Asn, Leu, Lys, Ile, His, Ala or Gly
  MOD_RES (18)...(18): Xaa = Ile, Lys, Asn, Arg, Ser or Thr
  MOD_RES (20)...(20): Xaa = Val, Gln, Leu, Lys, Ile or Glu
  MOD_RES (22)...(22): Xaa = Thr, Ser, Leu or Ile
  MOD_RES (23)...(23): Xaa = Val, Gln, Pro, Leu, Glu or Ala
  MOD_RES (25)...(25): Xaa = Ser or Gly
  MOD_RES (26)...(26): Xaa = Thr or Phe
  MOD_RES (27)...(27): Xaa = Ser, Arg, Gln, Lys or His
  MOD_RES (29)...(29): Xaa = Val, Ser, Arg, Gln, Asn, Met, Leu, Lys, Ile, His, Gly, Glu or Asp
  MOD_RES (31)...(31): Xaa = Val, Pro, Leu, Ala, His, Asn, Arg, Ser or Thr
  MOD_RES (32)...(32): Xaa = Gln, Pro, Glu, Ala, Lys or Thr
  MOD_RES (34)...(34): Xaa = Tyr or Phe
  MOD_RES (35)...(35): Xaa = Thr, Ser, Ala, Glu, Lys, Leu, Met, Pro, Gln or Val
  MOD_RES (36)...(36): Xaa = Gly, Leu, Pro, Gln or Arg
  MOD_RES (37)...(37): Xaa = Val, Thr, Gln, Pro, Leu, Lys, Ile, Glu, Ala, Asp, Gly, Asn or Ser
  MOD_RES (38)...(38): Xaa = Ser, Arg, Asn, Leu, Ile, His, Ala, Glu, Gly, Pro or Gln
  MOD_RES (39)...(39): Xaa = Ala, Asp, Asn or Thr
XDXBECXXXXXXCXXXXXCXBXXGXXXCXCXXGXXXXXXC

SEQ ID NO: 568 - protein, 41 aa, Artificial Sequence
  human calcium binding epidermal growth factor (CaEGF) domain
  MOD_RES (1)...(1): Xaa = Val, Thr, Ile, Lys, Glu or Ala
  MOD_RES (3)...(3): Xaa = Val or Ile
  MOD_RES (7)...(7): Xaa = Val, Ser, Leu, Ala, Asp, Glu, Gly, Lys, Asn, Arg or Thr
  MOD_RES (8)...(8): Xaa = Ser, Pro, Glu, Leu, Gln or Val
  MOD_RES (9)...(9): Xaa = Ser, Gly, Asn, Asp, Ile or Val
  MOD_RES (10)...(10): Xaa = Pro, Ala or Ser
  MOD_RES (11)...(11): Xaa = Asp, Gly, His, Asn, Arg or Ser
  MOD_RES (12)...(12): Xaa = Ala, Ile, Leu, Pro, Thr or Val
  MOD_RES (14)...(14): Xaa = Val, Thr, Ser, Arg, Gln, Pro, Asn, Met, Leu, Lys, Ile, His, Gly, Glu, Asp or Ala
  MOD_RES (15)...(15): Xaa = Ser, Arg, Asn or His
  MOD_RES (16)...(16): Xaa = Gly, Asp, Asn or Ser
  MOD_RES (17)...(17): Xaa = Ser, Arg, Gln, Asn, Leu, Lys, Ile, His, Ala or Gly
  MOD_RES (18)...(18): Xaa = Ile, Lys, Asn, Arg, Ser or Thr
  MOD_RES (20)...(20): Xaa = Val, Gln, Leu, Lys, Ile or Glu
  MOD_RES (22)...(22): Xaa = Thr, Ser, Leu or Ile
  MOD_RES (23)...(23): Xaa = Val, Gln, Pro, Leu, Glu or Ala
  MOD_RES (25)...(25): Xaa = Ser or Gly
  MOD_RES (26)...(26): Xaa = Thr or Phe
  MOD_RES (27)...(27): Xaa = Ser, Arg, Gln, Lys or His
  MOD_RES (29)...(29): Xaa = Val, Ser, Arg, Gln, Asn, Met, Leu, Lys, Ile, His, Gly, Glu or Asp
  MOD_RES (31)...(31): Xaa = Val, Pro, Leu, Ala, His, Asn, Arg, Ser or Thr
  MOD_RES (32)...(32): Xaa = Gln, Pro, Glu, Ala, Lys or Thr
  MOD_RES (34)...(34): Xaa = Tyr or Phe
  MOD_RES (35)...(35): Xaa = Thr, Ser, Ala, Glu, Lys, Leu, Met, Pro, Gln or Val
  MOD_RES (36)...(36): Xaa = Gly, Leu, Pro, Gln or Arg
  MOD_RES (37)...(37): Xaa = Val, Thr, Gln, Pro, Leu, Lys, Ile, Glu, Ala, Asp, Gly, Asn or Ser
  MOD_RES (38)...(38): Xaa = Ser, Arg, Asn, Leu, Ile, His, Ala, Glu, Gly, Pro or Gln
  MOD_RES (39)...(39): Xaa = Ala, Asp, Asn or Thr
  MOD_RES (40)...(40): Xaa = Gly, Arg or Ser
XDXBECXXXXXXCXXXXXCXBXXGXXXCXCXXGXXXXXXXC

SEQ ID NO: 569 - protein, 42 aa, Artificial Sequence
  human calcium binding epidermal growth factor (CaEGF) domain
  MOD_RES (1)...(1): Xaa = Val, Thr, Ile, Lys, Glu or Ala
  MOD_RES (3)...(3): Xaa = Val or Ile
  MOD_RES (7)...(7): Xaa = Val, Ser, Leu, Ala, Asp, Glu, Gly, Lys, Asn, Arg or Thr
  MOD_RES (8)...(8): Xaa = Ser, Pro, Glu, Leu, Gln or Val
  MOD_RES (9)...(9): Xaa = Ser, Gly, Asn, Asp, Ile or Val
  MOD_RES (10)...(10): Xaa = Pro, Ala or Ser
  MOD_RES (11)...(11): Xaa = Asp, Gly, His, Asn, Arg or Ser
  MOD_RES (12)...(12): Xaa = Ala, Ile, Leu, Pro, Thr or Val
  MOD_RES (14)...(14): Xaa = Val, Thr, Ser, Arg, Gln, Pro, Asn, Met, Leu, Lys, Ile, His, Gly, Glu, Asp or Ala
  MOD_RES (15)...(15): Xaa = Ser, Arg, Asn or His
  MOD_RES (16)...(16): Xaa = Gly, Asp, Asn or Ser
  MOD_RES (17)...(17): Xaa = Ser, Arg, Gln, Asn, Leu, Lys, Ile, His, Ala or Gly
  MOD_RES (18)...(18): Xaa = Ile, Lys, Asn, Arg, Ser or Thr
  MOD_RES (20)...(20): Xaa = Val, Gln, Leu, Lys, Ile or Glu
  MOD_RES (22)...(22): Xaa = Thr, Ser, Leu or Ile
  MOD_RES (23)...(23): Xaa = Val, Gln, Pro, Leu, Glu or Ala
  MOD_RES (25)...(25): Xaa = Ser or Gly
  MOD_RES (26)...(26): Xaa = Thr or Phe
  MOD_RES (27)...(27): Xaa = Ser, Arg, Gln, Lys or His
  MOD_RES (29)...(29): Xaa = Val, Ser, Arg, Gln, Asn, Met, Leu, Lys, Ile, His, Gly, Glu or Asp
  MOD_RES (31)...(31): Xaa = Val, Pro, Leu, Ala, His, Asn, Arg, Ser or Thr
  MOD_RES (32)...(32): Xaa = Gln, Pro, Glu, Ala, Lys or Thr
  MOD_RES (34)...(34): Xaa = Tyr or Phe
  MOD_RES (35)...(35): Xaa = Thr, Ser, Ala, Glu, Lys, Leu, Met, Pro, Gln or Val
  MOD_RES (36)...(36): Xaa = Gly, Leu, Pro, Gln or Arg
  MOD_RES (37)...(37): Xaa = Val, Thr, Gln, Pro, Leu, Lys, Ile, Glu, Ala, Asp, Gly, Asn or Ser
  MOD_RES (38)...(38): Xaa = Ser, Arg, Asn, Leu, Ile, His, Ala, Glu, Gly, Pro or Gln
  MOD_RES (39)...(39): Xaa = Ala, Asp, Asn or Thr
  MOD_RES (40)...(40): Xaa = Gly, Arg or Ser
  MOD_RES (41)...(41): Xaa = Lys, Asn, Arg, Ser or Thr
XDXBECXXXXXXCXXXXXCXBXXGXXXCXCXXGXXXXXXXXC

SEQ ID NO: 570 - protein, 43 aa, Artificial Sequence
  human calcium binding epidermal growth factor (CaEGF) domain
  MOD_RES (1)...(1): Xaa = Val, Thr, Ile, Lys, Glu or Ala
  MOD_RES (3)...(3): Xaa = Val or Ile
  MOD_RES (7)...(7): Xaa = Val, Ser, Leu, Ala, Asp, Glu, Gly, Lys, Asn, Arg or Thr
  MOD_RES (8)...(8): Xaa = Ser, Pro, Glu, Leu, Gln or Val
  MOD_RES (9)...(9): Xaa = Ser, Gly, Asn, Asp, Ile or Val
  MOD_RES (10)...(10): Xaa = Pro, Ala or Ser
  MOD_RES (11)...(11): Xaa = Asp, Gly, His, Asn, Arg or Ser
  MOD_RES (12)...(12): Xaa = Ala, Ile, Leu, Pro, Thr or Val
  MOD_RES (14)...(14): Xaa = Val, Thr, Ser, Arg, Gln, Pro, Asn, Met, Leu, Lys, Ile, His, Gly, Glu, Asp or Ala
  MOD_RES (15)...(15): Xaa = Ser, Arg, Asn or His
  MOD_RES (16)...(16): Xaa = Gly, Asp, Asn or Ser
  MOD_RES (17)...(17): Xaa = Ser, Arg, Gln, Asn, Leu, Lys, Ile, His, Ala or Gly
  MOD_RES (18)...(18): Xaa = Ile, Lys, Asn, Arg, Ser or Thr
  MOD_RES (20)...(20): Xaa = Val, Gln, Leu, Lys, Ile or Glu
  MOD_RES (22)...(22): Xaa = Thr, Ser, Leu or Ile
  MOD_RES (23)...(23): Xaa = Val, Gln, Pro, Leu, Glu or Ala
  MOD_RES (25)...(25): Xaa = Ser or Gly
  MOD_RES (26)...(26): Xaa = Thr or Phe
  MOD_RES (27)...(27): Xaa = Ser, Arg, Gln, Lys or His
  MOD_RES (29)...(29): Xaa = Val, Ser, Arg, Gln, Asn, Met, Leu, Lys, Ile, His, Gly, Glu or Asp
  MOD_RES (31)...(31): Xaa = Val, Pro, Leu, Ala, His, Asn, Arg, Ser or Thr
  MOD_RES (32)...(32): Xaa = Gln, Pro, Glu, Ala, Lys or Thr
  MOD_RES (34)...(34): Xaa = Tyr or Phe
  MOD_RES (35)...(35): Xaa = Thr, Ser, Ala, Glu, Lys, Leu, Met, Pro, Gln or Val
  MOD_RES (36)...(36): Xaa = Gly, Leu, Pro, Gln or Arg
  MOD_RES (37)...(37): Xaa = Val, Thr, Gln, Pro, Leu, Lys, Ile, Glu, Ala, Asp, Gly, Asn or Ser
  MOD_RES (38)...(38): Xaa = Ser, Arg, Asn, Leu, Ile, His, Ala, Glu, Gly, Pro or Gln
  MOD_RES (39)...(39): Xaa = Ala, Asp, Asn or Thr
  MOD_RES (40)...(40): Xaa = Gly, Arg or Ser
  MOD_RES (41)...(41): Xaa = Lys, Asn, Arg, Ser or Thr
  MOD_RES (42)...(42): Xaa = Ala, Asp, Glu, Gly, Lys, Asn, Arg, Ser or Thr
XDXBECXXXXXXCXXXXXCXBXXGXXXCXCXXGXXXXXXXXXC

SEQ ID NO: 571 - DNA, 31 bp, Artificial Sequence
  Group 1 assembly PCR oligonucleotide 1
aaaaggcctcgagggcctgggtggcaatggt

SEQ ID NO: 572 - DNA, 72 bp, Artificial Sequence
  Group 1 assembly PCR oligonucleotide 2
  modified_base (25)...(25): n = g, a, c or t
cctgaaccaccacakhkaccgyksnbgcacggayycgrcrmacattcatyaayatctdyaccattgccaccc

SEQ ID NO: 573 - DNA, 75 bp, Artificial Sequence
  Group 1 assembly PCR oligonucleotide 3
  modified_base (16)...(16): n = g, a, c or t
cctgaaccaccacakntgscgyygykmhsgcacggayycgrcrmacattcatyaayatctdyaccattgccaccc

SEQ ID NO: 574 - DNA, 78 bp, Artificial Sequence
  Group 1 assembly PCR oligonucleotide 4
  modified_base (25)...(25): n = g, a, c or t
cctgaaccaccacakhkaccgyksnbgcaarbaybcgvahycwskbyacattcatyaayatctdyaccattgccaccc

SEQ ID NO: 575 - DNA, 81 bp, Artificial Sequence
  Group 1 assembly PCR oligonucleotide 5
  modified_base (16)...(16): n = g, a, c or t
cctgaaccaccacakntgscgyygykmhsgcaarbaybcgvahycwskbyacattcatyaayatctdyaccattgccaccc

SEQ ID NO: 576 - DNA, 81 bp, Artificial Sequence
  Group 1 assembly PCR oligonucleotide 6
tgaattttctgtatgaggttttgctaaacaactttcaacagtttcggccccagaggccctggagccacctgaaccaccaca

SEQ ID NO: 577 - DNA, 50 bp, Artificial Sequence
  Group 2 assembly PCR oligonucleotide 1
acggtgcctacccgtatgatgttccggattatgccccgggtggcaatggt

SEQ ID NO: 578 - DNA, 84 bp, Artificial Sequence
  Group 2 assembly PCR oligonucleotide 2
cctgaaccaccacaghktdbaccgghawagcctkscrsgcashbacakykawagcyacccdstrwatytwbaccattgccaccc

SEQ ID NO: 579 - DNA, 96 bp, Artificial Sequence
  Group 2 assembly PCR oligonucleotide 3
  modified_base (34)...(34): n = g, a, c or t
cctgaaccaccacakbykbtkcygkycbsabycngcdbawagcctkbgbkgcashbacakykawagcyacccdstrwatytwbaccattgccaccc

SEQ ID NO: 580 - DNA, 31 bp, Artificial Sequence
  Group 2 assembly PCR oligonucleotide 4
aaaaggccccagaggcccctgaaccaccaca

SEQ ID NO: 581 - DNA, 31 bp, Artificial Sequence; identical to SEQ ID NO: 571
  ligated DNA PCR amplification primer

SEQ ID NO: 582 - DNA, 31 bp, Artificial Sequence; identical to SEQ ID NO: 580
  ligated DNA PCR amplification primer

SEQ ID NO: 583 - protein, 20 aa, Artificial Sequence
  glycine, serine flexible linker
SGGGGSGGGGSGGGGSGGGG

SEQ ID NO: 584 - protein, 39 aa, Artificial Sequence
  A domain
  MOD_RES (1)...(39): Xaa = any amino acid
  DISULFID (1)...(15)
  DISULFID (9)...(28)
  DISULFID (22)...(39)
CXXXXEFRCAXXGRCIPSSWVCDGEDDCGDGSDEXXXXC

SEQ ID NO: 585 - protein, 40 aa, Artificial Sequence
  A domain
  MOD_RES (1)...(40): Xaa = any amino acid
  DISULFID (1)...(15)
  DISULFID (9)...(28)
  DISULFID (22)...(40)
CXXXXEFRCAXXGRCIPSSWVCDGEDDCGDGSDEXXXXXC

SEQ ID NO: 586 - protein, 41 aa, Artificial Sequence
  A domain
  MOD_RES (1)...(41): Xaa = any amino acid
  DISULFID (1)...(15)
  DISULFID (9)...(28)
  DISULFID (22)...(41)
CXXXXEFRCAXXGRCIPSSWVCDGEDDCGDGSDEXXXXXXC

SEQ ID NO: 587 - protein, 40 aa, Artificial Sequence
  A domain
  MOD_RES (1)...(40): Xaa = any amino acid
  DISULFID (1)...(16)
  DISULFID (10)...(29)
  DISULFID (23)...(40)
CXXXXXEFRCAXXGRCIPSSWVCDGEDDCGDGSDEXXXXC

SEQ ID NO: 588 - protein, 41 aa, Artificial Sequence
  A domain
  MOD_RES (1)...(41): Xaa = any amino acid
  DISULFID (1)...(16)
  DISULFID (10)...(29)
  DISULFID (23)...(41)
CXXXXXEFRCAXXGRCIPSSWVCDGEDDCGDGSDEXXXXXC

SEQ ID NO: 589 - protein, 42 aa, Artificial Sequence
  A domain
  MOD_RES (1)...(42): Xaa = any amino acid
  DISULFID (1)...(16)
  DISULFID (10)...(29)
  DISULFID (23)...(42)
CXXXXXEFRCAXXGRCIPSSWVCDGEDDCGDGSDEXXXXXXC

SEQ ID NO: 590 - protein, 41 aa, Artificial Sequence
  A domain
  MOD_RES (1)...(41): Xaa = any amino acid
  DISULFID (1)...(17)
  DISULFID (11)...(30)
  DISULFID (24)...(41)
CXXXXXXEFRCAXXGRCIPSSWVCDGEDDCGDGSDEXXXXC

SEQ ID NO: 591 - protein, 42 aa, Artificial Sequence
  A domain
  MOD_RES (1)...(42): Xaa = any amino acid
  DISULFID (1)...(17)
  DISULFID (11)...(30)
  DISULFID (24)...(42)
CXXXXXXEFRCAXXGRCIPSSWVCDGEDDCGDGSDEXXXXXC

SEQ ID NO: 592 - protein, 43 aa, Artificial Sequence
  A domain
  MOD_RES (1)...(43): Xaa = any amino acid
  DISULFID (1)...(17)
  DISULFID (11)...(30)
  DISULFID (24)...(43)
CXXXXXXEFRCAXXGRCIPSSWVCDGEDDCGDGSDEXXXXXXC

SEQ ID NO: 593 - protein, 40 aa, Artificial Sequence
  A domain
  MOD_RES (1)...(40): Xaa = any amino acid
  DISULFID (1)...(16)
  DISULFID (9)...(29)
  DISULFID (23)...(40)
CXXXXEFRCAXXXGRCIPSSWVCDGEDDCGDGSDEXXXXC

SEQ ID NO: 594 - protein, 41 aa, Artificial Sequence
  A domain
  MOD_RES (1)...(41): Xaa = any amino acid
  DISULFID (1)...(16)
  DISULFID (9)...(29)
  DISULFID (23)...(41)
CXXXXEFRCAXXXGRCIPSSWVCDGEDDCGDGSDEXXXXXC

SEQ ID NO: 595 - protein, 42 aa, Artificial Sequence
  A domain
  MOD_RES (1)...(42): Xaa = any amino acid
  DISULFID (1)...(16)
  DISULFID (9)...(29)
  DISULFID (23)...(42)
CXXXXEFRCAXXXGRCIPSSWVCDGEDDCGDGSDEXXXXXXC

SEQ ID NO: 596 - protein, 41 aa, Artificial Sequence
  A domain
  MOD_RES (1)...(41): Xaa = any amino acid
  DISULFID (1)...(17)
  DISULFID (10)...(30)
  DISULFID (24)...(41)
CXXXXXEFRCAXXXGRCIPSSWVCDGEDDCGDGSDEXXXXC

SEQ ID NO: 597 - protein, 42 aa, Artificial Sequence
  A domain
  MOD_RES (1)...(42): Xaa = any amino acid
  DISULFID (1)...(17)
  DISULFID (10)...(30)
  DISULFID (24)...(42)
CXXXXXEFRCAXXXGRCIPSSWVCDGEDDCGDGSDEXXXXXC

SEQ ID NO: 598 - protein, 43 aa, Artificial Sequence
  A domain
  MOD_RES (1)...(43): Xaa = any amino acid
  DISULFID (1)...(17)
  DISULFID (10)...(30)
  DISULFID (24)...(43)
CXXXXXEFRCAXXXGRCIPSSWVCDGEDDCGDGSDEXXXXXXC

SEQ ID NO: 599 - protein, 42 aa, Artificial Sequence
  A domain
  MOD_RES (1)...(42): Xaa = any amino acid
  DISULFID (1)...(18)
  DISULFID (11)...(31)
  DISULFID (25)...(42)
CXXXXXXEFRCAXXXGRCIPSSWVCDGEDDCGDGSDEXXXXC

SEQ ID NO: 600 - protein, 43 aa, Artificial Sequence
  A domain
  MOD_RES (1)...(43): Xaa = any amino acid
  DISULFID (1)...(18)
  DISULFID (11)...(31)
  DISULFID (25)...(43)
CXXXXXXEFRCAXXXGRCIPSSWVCDGEDDCGDGSDEXXXXXC

SEQ ID NO: 601 - protein, 44 aa, Artificial Sequence
  A domain
  MOD_RES (1)...(44): Xaa = any amino acid
  DISULFID (1)...(18)
  DISULFID (11)...(31)
  DISULFID (25)...(44)
CXXXXXXEFRCAXXXGRCIPSSWVCDGEDDCGDGSDEXXXXXXC

SEQ ID NO: 602 - protein, 41 aa, Artificial Sequence
  A domain
  MOD_RES (1)...(41): Xaa = any amino acid
  DISULFID (1)...(17)
  DISULFID (9)...(30)
  DISULFID (24)...(41)
CXXXXEFRCAXXXXGRCIPSSWVCDGEDDCGDGSDEXXXXC

SEQ ID NO: 603 - protein, 42 aa, Artificial Sequence
  A domain
  MOD_RES (1)...(42): Xaa = any amino acid
  DISULFID (1)...(17)
  DISULFID (9)...(30)
  DISULFID (24)...(42)
CXXXXEFRCAXXXXGRCIPSSWVCDGEDDCGDGSDEXXXXXC

SEQ ID NO: 604 - protein, 43 aa, Artificial Sequence
  A domain
  MOD_RES (1)...(43): Xaa = any amino acid
  DISULFID (1)...(17)
  DISULFID (9)...(30)
  DISULFID (24)...(43)
CXXXXEFRCAXXXXGRCIPSSWVCDGEDDCGDGSDEXXXXXXC

SEQ ID NO: 605 - protein, 42 aa, Artificial Sequence
  A domain
  MOD_RES (1)...(42): Xaa = any amino acid
  DISULFID (1)...(18)
  DISULFID (10)...(31)
  DISULFID (25)...(42)
CXXXXXEFRCAXXXXGRCIPSSWVCDGEDDCGDGSDEXXXXC

SEQ ID NO: 606 - protein, 43 aa, Artificial Sequence
  A domain
  MOD_RES (1)...(43): Xaa = any amino acid
  DISULFID (1)...(18)
  DISULFID (10)...(31)
  DISULFID (25)...(43)
CXXXXXEFRCAXXXXGRCIPSSWVCDGEDDCGDGSDEXXXXXC

SEQ ID NO: 607 - protein, 44 aa, Artificial Sequence
  A domain
  MOD_RES (1)...(44): Xaa = any amino acid
  DISULFID (1)...(18)
  DISULFID (10)...(31)
  DISULFID (25)...(44)
CXXXXXEFRCAXXXXGRCIPSSWVCDGEDDCGDGSDEXXXXXXC

SEQ ID NO: 608 - protein, 43 aa, Artificial Sequence
  A domain
  MOD_RES (1)...(43): Xaa = any amino acid
  DISULFID (1)...(19)
  DISULFID (11)...(32)
  DISULFID (26)...(43)
CXXXXXXEFRCAXXXXGRCIPSSWVCDGEDDCGDGSDEXXXXC

SEQ ID NO: 609 - protein, 44 aa, Artificial Sequence
  A domain
  MOD_RES (1)...(44): Xaa = any amino acid
  DISULFID (1)...(19)
  DISULFID (11)...(32)
  DISULFID (26)...(44)
CXXXXXXEFRCAXXXXGRCIPSSWVCDGEDDCGDGSDEXXXXXC

SEQ ID NO: 610 - protein, 45 aa, Artificial Sequence
  A domain
  MOD_RES (1)...(45): Xaa = any amino acid
  DISULFID (1)...(19)
  DISULFID (11)...(32)
  DISULFID (26)...(45)
CXXXXXXEFRCAXXXXGRCIPSSWVCDGEDDCGDGSDEXXXXXXC

SEQ ID NO: 611 - DNA, 56 bp, Artificial Sequence
  A-domain assembly PCR oligonucleotide 1
  modified_base (1)...(56): n = g, a, c or t
atatcccgggtctggaggcgtctggtggttcgtgtnnknnknnknnkgaattccga

SEQ ID NO: 612 - DNA, 59 bp, Artificial Sequence
  A-domain assembly PCR oligonucleotide 2
  modified_base (1)...(59): n = g, a, c or t
atatcccgggtctggaggcgtctggtggttcgtgtnnknnknnknnknnkgaattccga

SEQ ID NO: 613 - DNA, 62 bp, Artificial Sequence
  A-domain assembly PCR oligonucleotide 3
  modified_base (1)...(62): n = g, a, c or t
atatcccgggtctggaggcgtctggtggttcgtgtnnknnknnknnknnknnkgaattccga

SEQ ID NO: 614 - DNA, 56 bp, Artificial Sequence
  A-domain assembly PCR oligonucleotide 4
  modified_base (1)...(56): n = g, a, c or t
atatcccgggtctggaggcgtctggtggttcgtgttatnnknnknnkgaattccga

SEQ ID NO: 615 - DNA, 59 bp, Artificial Sequence
  A-domain assembly PCR oligonucleotide 5
  modified_base (1)...(59): n = g, a, c or t
atatcccgggtctggaggcgtctggtggttcgtgtnnktatnnknnknnkgaattccga

SEQ ID NO: 616 - DNA, 56 bp, Artificial Sequence
  A-domain assembly PCR oligonucleotide 6
  modified_base (1)...(56): n = g, a, c or t
atatcccgggtctggaggcgtctggtggttcgtgtnnktatnnknnkgaattccga

SEQ ID NO: 617 - DNA, 56 bp, Artificial Sequence
  A-domain assembly PCR oligonucleotide 7
  modified_base (1)...(56): n = g, a, c or t
atatcccgggtctggaggcgtctggtggttcgtgtnnknnktatnnkgaattccga

SEQ ID NO: 618 - DNA, 56 bp, Artificial Sequence
  A-domain assembly PCR oligonucleotide 8
  modified_base (1)...(56): n = g, a, c or t
atatcccgggtctggaggcgtctggtggttcgtgtnnknnknnktatgaattccga

SEQ ID NO: 619 - DNA, 59 bp, Artificial Sequence
  A-domain assembly PCR oligonucleotide 9
  modified_base (1)...(59): n = g, a, c or t
atatcccgggtctggaggcgtctggtggttcgtgtnnknnknnktatnnkgaattccga

SEQ ID NO: 620 - DNA, 49 bp, Artificial Sequence
  A-domain assembly PCR oligonucleotide 10
  modified_base (1)...(49): n = g, a, c or t
atacccaagaagacggtatacatcgtccmnnmnntgcacatcggaattc

SEQ ID NO: 621 - DNA, 52 bp, Artificial Sequence
  A-domain assembly PCR oligonucleotide 11
  modified_base (1)...(52): n = g, a, c or t
atacccaagaagacggtatacatcgtccmnnmnnmnntgcacatcggaattc

SEQ ID NO: 622 - DNA, 55 bp, Artificial Sequence
  A-domain assembly PCR oligonucleotide 12
  modified_base (1)...(55): n = g, a, c or t
atacccaagaagacggtatacatcgtccmnnmnnmnnmnntgcacatcggaattc

SEQ ID NO: 623 - DNA, 52 bp, Artificial Sequence
  A-domain assembly PCR oligonucleotide 13
  modified_base (1)...(52): n = g, a, c or t
atacccaagaagacggtatacatcgtccatamnnmnntgcacatcggaattc

SEQ ID NO: 624 - DNA, 55 bp, Artificial Sequence
  A-domain assembly PCR oligonucleotide 14
  modified_base (1)...(55): n = g, a, c or t
atacccaagaagacggtatacatcgtccmnnatamnnmnntgcacatcggaattc

SEQ ID NO: 625 - DNA, 52 bp, Artificial Sequence
  A-domain assembly PCR oligonucleotide 15
  modified_base (1)...(52): n = g, a, c or t
atacccaagaagacggtatacatcgtccmnnatamnntgcacatcggaattc

SEQ ID NO: 626 - DNA, 52 bp, Artificial Sequence
  A-domain assembly PCR oligonucleotide 16
  modified_base (1)...(52): n = g, a, c or t
atacccaagaagacggtatacatcgtccmnnmnnatatgcacatcggaattc

SEQ ID NO: 627 - DNA, 55 bp, Artificial Sequence
  A-domain assembly PCR oligonucleotide 17
  modified_base (1)...(55): n = g, a, c or t
atacccaagaagacggtatacatcgtccmnnmnnatamnntgcacatcggaattc

SEQ ID NO: 628 - DNA, 55 bp, Artificial Sequence
  A-domain assembly PCR oligonucleotide 18
accgtcttcttgggtatgtgacggggaggacgattgtggtgacggatctgacgag

SEQ ID NO: 629 - DNA, 66 bp, Artificial Sequence
  A-domain assembly PCR oligonucleotide 19
  modified_base (1)...(66): n = g, a, c or t
atatggccccagaggcctgcaatgatccaccgcccccacamnnmnnmnnmnnctcgtcagatccgt

SEQ ID NO: 630 - DNA, 69 bp, Artificial Sequence
  A-domain assembly PCR oligonucleotide 20
  modified_base (1)...(69): n = g, a, c or t
atatggccccagaggcctgcaatgatccaccgcccccacamnnmnnmnnmnnmnnctcgtcagatccgt

SEQ ID NO: 631 - DNA, 72 bp, Artificial Sequence
  A-domain assembly PCR oligonucleotide 21
  modified_base (1)...(72): n = g, a, c or t
atatggccccagaggcctgcaatgatccaccgcccccacamnnmnnmnnmnnmnnmnnctcgtcagatccgt

SEQ ID NO: 632 - DNA, 66 bp, Artificial Sequence
  A-domain assembly PCR oligonucleotide 22
  modified_base (1)...(66): n = g, a, c or t
atatggccccagaggcctgcaatgatccaccgcccccacaatamnnmnnmnnctcgtcagatccgt

SEQ ID NO: 633 - DNA, 69 bp, Artificial Sequence
  A-domain assembly PCR oligonucleotide 23
  modified_base (1)...(69): n = g, a, c or t
atatggccccagaggcctgcaatgatccaccgcccccacamnnatamnnmnnmnnctcgtcagatccgt

SEQ ID NO: 634 - DNA, 66 bp, Artificial Sequence
  A-domain assembly PCR oligonucleotide 24
  modified_base (1)...(66): n = g, a, c or t
atatggccccagaggcctgcaatgatccaccgcccccacamnnatamnnmnnctcgtcagatccgt

SEQ ID NO: 635 - DNA, 66 bp, Artificial Sequence
  A-domain assembly PCR oligonucleotide 25
  modified_base (1)...(66): n = g, a, c or t
atatggccccagaggcctgcaatgatccaccgcccccacamnnmnnatamnnctcgtcagatccgt

SEQ ID NO: 636 - DNA, 66 bp, Artificial Sequence
  A-domain assembly PCR oligonucleotide 26
  modified_base (1)...(66): n = g, a, c or t
atatggccccagaggcctgcaatgatccaccgcccccacamnnmnnmnnatactcgtcagatccgt

SEQ ID NO: 637 - DNA, 69 bp, Artificial Sequence
  A-domain assembly PCR oligonucleotide 27
  modified_base (1)...(69): n = g, a, c or t
atatggccccagaggcctgcaatgatccaccgcccccacamnnmnnmnnatamnnctcgtcagatccgt

SEQ ID NO: 638 - DNA, 43 bp, Artificial Sequence
  linker oligonucleotide 1
  modified_base (1)...(43): n = g, a, c or t
aaaactgcaatgacnnmnnmnnmnnacagcctgcttcatccga

SEQ ID NO: 639 - DNA, 49 bp, Artificial Sequence
  linker oligonucleotide 2
  modified_base (1)...(49): n = g, a, c or t
aaaactgcaatgacnnmnnmnnmnnmnnmnnacagcctgcttcatccga

SEQ ID NO: 640 - DNA, 55 bp, Artificial Sequence
  linker oligonucleotide 3
  modified_base (1)...(55): n = g, a, c or t
aaaactgcaatgacnnmnnmnnmnnmnnmnnmnnmnnacagcctgcttcatccga

SEQ ID NO: 641 - DNA, 61 bp, Artificial Sequence
  linker oligonucleotide 4
  modified_base (1)...(61): n = g, a, c or t
aaaactgcaatgacnnmnnmnnmnnmnnmnnmnnmnnmnnmnnacagcctgcttcatccga

SEQ ID NO: 642 - DNA, 67 bp, Artificial Sequence
  linker oligonucleotide 5
  modified_base (1)...(67): n = g, a, c or t
aaaactgcaatgacnnmnnmnnmnnmnnmnnmnnmnnmnnmnnmnnmnnacagcctgcttcatccga

SEQ ID NO: 643 - DNA, 73 bp, Artificial Sequence
  linker oligonucleotide 6
  modified_base (1)...(73): n = g, a, c or t
aaaactgcaatgacnnmnnmnnmnnmnnmnnmnnmnnmnnmnnmnnmnnmnnmnnacagcctgcttcatccga

SEQ ID NO: 644 - DNA, 79 bp, Artificial Sequence
  linker oligonucleotide 7
  modified_base (1)...(79): n = g, a, c or t
aaaactgcaatgacnnmnnmnnmnnmnnmnnmnnmnnmnnmnnmnnmnnmnnmnnmnnmnnacagcctgcttcatccga

SEQ ID NO: 645 - DNA, 85 bp, Artificial Sequence
  linker oligonucleotide 8
  modified_base (1)...(85): n = g, a, c or t
aaaactgcaatgacnnmnnmnnmnnmnnmnnmnnmnnmnnmnnmnnmnnmnnmnnmnnmnnmnnmnnacagcctgcttcatccga

SEQ ID NO: 646 - DNA, 20 bp, Artificial Sequence
  generic PCR primer SfiI
tcaacagtttcggccccaga

SEQ ID NO: 647 - DNA, 21 bp, Artificial Sequence
  PCR amplification primer BpmI
atgccccgggtctggaggcgt

SEQ ID NO: 648 - protein, 35 aa, Artificial Sequence
  canonical A-domain sequence
  MOD_RES (1)...(35): Xaa = any amino acid, high-diversity position
CXXXXFXCXXXXCIXXXWXCDGXXDCXDXSDEXXC

SEQ ID NO: 649 - protein, 46 aa, Artificial Sequence
  anti-CD 40 ligand (anti-CD40L) positive clone pmA2_84
CRPNQFTCGNGHCLPRTWLCDGVPDCQDSSDETPIPCKSSVPTSLQ

SEQ ID NO: 650 - protein, 54 aa, Artificial Sequence
  anti-CD 40 ligand (anti-CD40L) positive clone A5C1
CQSSQFRCRDNSTCLPLRLRCDGVNDCRDGSDESPALCGRPGPGATSAPAASLQ

SEQ ID NO: 651 - protein, 52 aa, Artificial Sequence
  anti-CD 40 ligand (anti-CD40L) positive clone pmA2_18
CPADQFQCKNGSCIPRPLRCDGVEDCADGSDEGQDCGRPGPGATSAPAASLQ

SEQ ID NO: 652 - protein, 46 aa, Artificial Sequence
  anti-CD 40 ligand (anti-CD40L) positive clone pmA5_79
CARDGEFRCAMNGRCIPSSWVCDGEDDCGDGSDESQVYCGGGGSLQ

SEQ ID NO: 653 - protein, 45 aa, Artificial Sequence
  anti-CD 40 ligand (anti-CD40L) positive clone A2F10
CLPSQFPCQNSSICVPPALVCDGDADCGDDSDEASCAPPGSLSLQ

SEQ ID NO: 654 - protein, 42 aa, Artificial Sequence
  anti-CD 40 ligand (anti-CD40L) positive clone A1E9
CAPGEFTCGNGHCLSRALRCDGDDGCLDNSDEKNCPQRTSLQ

SEQ ID NO: 655 - protein, 42 aa, Artificial Sequence
  anti-CD 40 ligand (anti-CD40L) positive clone pmA11_40
CLANECTCDSGRCLPLPLVCDGVPDCEDDSDEKNCTKPTSLQ

SEQ ID NO: 656 - protein, 44 aa, Artificial Sequence
  anti-human serum albumin (anti-HSA) positive clone A5B_10
CRPSQFRCGSGKCIPQPWGCDGVPDCEDNSDETDCKTPVRTSLQ

SEQ ID NO: 657 - protein, 44 aa, Artificial Sequence
  anti-human serum albumin (anti-HSA) positive clone A5_2_68
CPASQFRCENGHCVPPEWLCDGVDDCQDDSDESSATCQPRTSLQ

SEQ ID NO: 658 - protein, 43 aa, Artificial Sequence
  anti-human serum albumin (anti-HSA) positive clone A5_8_93
CAPGQFRCRNYGTCISLRWGCDGVNDCGDGSDEQNCTPHTSLQ

SEQ ID NO: 659 - protein, 37 aa, Artificial Sequence
  anti-human serum albumin (anti-HSA) positive clone A1_4
CLANQFKCESGHCLPPALVCDGVDDCQDSSDEASANC

SEQ ID NO: 660 - protein, 44 aa, Artificial Sequence
  anti-human serum albumin (anti-HSA) positive clone A1_34
CNPTGKFKCRSGRCVPRESCRCDGVDDCEDNSDEKDCQPHTSLQ

SEQ ID NO: 661 - protein, 42 aa, Artificial Sequence
  anti-human serum albumin (anti-HSA) positive clone A2_10
CESSEFQCENGHCLPVPWLCDGVNDCADGSDEKNCPKPTSLQ

SEQ ID NO: 662 - DNA, 21 bp, Artificial Sequence
  PCR fragment overlap reaction oligo for intra-domain optimization by recombination
  modified_base (1)...(21): n = g, a, c or t
  modified_base (16)...(21): positions 16-21 may be present or absent
nnknnknnknnknnknnknnk

SEQ ID NO: 663 - protein, 6 aa, Artificial Sequence
  segment of single domain
SREVDK

SEQ ID NO: 664 - protein, 6 aa, Artificial Sequence
  segment of single domain
VSTRGG

SEQ ID NO: 665 - protein, 6 aa, Artificial Sequence
  segment of single domain
KLEVST

1. A method for identifying a monomer domain that binds to a target molecule, the method comprising,
providing a library of monomer domains, wherein the monomer domains each bind an ion;
screening the library of monomer domains for affinity to a first target molecule; and
identifying at least one monomer domain that binds to at least one target molecule.

2. The, method of claim 1, wherein the monomer comprises an amino acid sequence in which:
at least 10% of the amino acids in the sequence are cysteine; and
the amino acid sequence is at least 50 amino acids long; and/or at least 25% of the amino acids are non-naturally-occurring amino acids.

3. The method of claim 1, wherein the ion is selected from calcium or zinc.

4. The method of claim 1, wherein the monomer domain is selected from the group consisting of an A domain, EGF domain, EF Hand, Cadherin domain, C-type lectin, C2 domain, Annexin, Gla-domain, Trombospondin type 3 domain and zinc finger.

5. The method of claim 1, further comprising linking the identified monomer domains to a second monomer domain to form a library of multimers, each multimer comprising at least two monomer domains;
screening the library of multimers for the ability to bind to the first target molecule; and
identifying a multimer that binds to the first target molecule.

6. The method of claim 1, wherein the monomer domains are between 25 and 500 amino acids.

7. The method of claim 1, wherein each monomer domain of the selected multimer binds to the same target molecule.

8. The method of claim 1, wherein the selected multimer comprises at least three monomer domains.

9. The method of claim 1, wherein the selected multimer comprises four monomer domains.

10. The method of claim 5, comprising identifying a multimer with an improved avidity for the target compared to the avidity of a monomer domain alone.

11. The method of claim 1, wherein the monomer domain is an LDL receptor class A domain monomer comprising the following sequence:
CₐX₃₋₁₅C_{b}X3-15C_{c}X₆₋₇C_{d}(D,N)X₄CₑX₄₋₆DEX₂₋₈C_{f} (SEQ ID NO:219)
wherein C is cysteine, Xₙ₋ₘ represents between n and m number of independently selected amino acids, and (D,N) indicates that the position can be either D or N; and
wherein Cₐ-C_{c}, C_{b}-Cₑ and C_{d}-C_{f} form disulfide bonds.

12. The method of claim 11, wherein the monomer domain is an LDL receptor class A domain monomer comprising the following sequence:
CₐX₆₋₇C_{b}X₄₋₅C_{c}X₆C_{d}X₅CₑX₈₋₁₀C_{f} (SEQ ID NOS:220-231)
wherein X is defined as follows:

[chemical structure]

[chemical structure]

[chemical structure]

13. The method of claim 1, wherein the monomer domain is an EGF domain monomer comprising the following sequence:
CₐX₃₋₁₄C_{b}X₃₋₇C_{c}X₄₋₁₆C_{d}X₁₋₂CₑX₈₋₂₃C_{f} (SEQ ID NO:232)
wherein C is cysteine, Xₙ₋ₘ represents between n and m number of independently selected amino acids; and
wherein Cₐ-C_{c}, C_{b}-Cₑ and C_{d}-C_{f} form disulfide bonds.

14. The method of claim 11, wherein the monomer domain is an EGF domain monomer comprising the following sequence:
CₐX₄₋₆C_{b}X₃₋₅C_{c}X₈₋₉C_{d}X₁CₑX₈₋₁₂C_{f} (SEQ ID NOS:233-322)
wherein X is defined as follows:

[chemical structure]

[chemical structure]

[chemical structure]

15. The method of claim 1, further comprising a step of mutating at least one monomer domain, thereby providing a library comprising mutated monomer domains.

16. The method of claim 15, wherein the mutating step comprises recombining a plurality of polynucleotide fragments of at least one polynucleotide encoding a polypeptide domain.

17. The method of claim 15, wherein the mutating step comprises directed evolution.

18. The method of claim 15, wherein the mutating step comprises site-directed mutagenesis.

19. The method of claim 1, further comprising, screening the library of monomer domains for affinity to a second target molecule;
identifying a monomer domain that binds to a second target molecule;
linking at least one monomer domain with affinity for the first target molecule with at least one monomer domain with affinity for the second target molecule, thereby forming a multimer with affinity for the first and the second target molecule.

20. The method of claim 1, wherein the target molecule is selected from the group consisting of a viral antigen, a bacterial antigen, a fungal antigen, an enzyme, an enzyme substrate, a cell surface protein, an enzyme inhibitor, a reporter molecule, and a receptor.

21. The method of claim 1, wherein the library of monomer domains is expressed as a phage display, ribosome display or cell surface display.

22. The method of claim 1, wherein the library of monomer domains is presented on a microarray.

23. The method of claim 1, wherein the monomer domains form a secondary structure by the formation of disulfide bonds.

24. The method of claim 1, wherein the monomer domains are linked by a polypeptide linker.

25. The method of claim 24, wherein the polypeptide linker is a linker naturally-associated with the monomer domain.

26. The method of claim 24, wherein the polypeptide linker is a variant of a linker naturally-associated with the monomer domain.

27. The method of claim 24, wherein the linker is between 1-20 amino acids.

28. The method of claim 24, wherein the linker comprises the following sequence, A₁A₂A₃A₄A₅A₆ (SEQ ID NO:352), wherein
A1 is selected from the amino acids A, P, T, Q, E and K;
A₂ and A₃ are any amino acid except C, F, Y, W, or M;
A₄ is selected from the amino acids S, G and R;
A₅ is selected from the amino acids H, P, and R
A₆ is the amino acid, T.

29. A method of producing a polypeptide comprising the monomer domain identified in claim 1.

30. The method of claim 29, wherein the polypeptide is produced by recombinant gene expression.

31. A polypeptide comprising the monomer domain identified in claim 1.

32. A polynucleotide encoding the monomer domain identified in claim 1.

33. A method for identifying a multimer that binds to at least one target molecule, the method comprising:
providing a library of multimers, wherein each multimer comprises at least two monomer domains and each monomer domain exhibits a binding specificity for a target molecule; and
screening the library of multimers for target molecule-binding multimers.

34. The method of claim 33, further comprising identifying target molecule-binding multimers having an avidity for the target molecule that is greater than the avidity of a single monomer domain for the target molecule.

35. The method of claim 33, wherein one or more of the multimers comprises a monomer domain that specifically binds to a second target molecule.

36. A method of producing a polypeptide comprising the multimer identified in claim 33.

37. The method of claim 36, wherein the polypeptide is produced by recombinant gene expression.

38. A method for identifying a multimer that binds to a target molecule, the method comprising,
providing a library of monomer domains and/or immuno domains;
screening the library of monomer domains and/or immuno domain for affinity to a first target molecule; and
identifying at least one monomer domain and/or immuno domain that binds to at least one target molecule;
linking the identified monomer domain and/or immuno domain to a library of monomer domains and/or immuno domains to form a library of multimers, each multimer comprising at least two monomer domains, immuno domains or combinations thereof;
screening the library of multimers for the ability to bind to the first target molecule; and
identifying a multimer that binds to the first target molecule.

39. The method of claim 38, wherein the monomer domains each bind an ion.

40. The method of claim 39, wherein the ion is selected from the group consisting of calcium and zinc.

41. The method of claim 38, wherein the monomer domains are selected from the group consisting of an A domain, EGF domain, EF Hand, Cadherin domain, C-type lectin, C2 domain, Annexin, Gla-domain, Trombospondin type 3 domain and zinc finger.

42. A library of multimers, wherein each multimer comprises at least two monomer domains connected by a linker; and
each monomer domain binds an ion.

43. The library of claim 42, wherein the ion is selected from calcium and zinc.

44. The library of claim 42, wherein each monomer domain of the multimers is a non-naturally occurring monomer domain.

45. The library of claim 42, wherein the monomer domains are between 25 and 500 amino acids.

46. The library of claim 42, wherein the polypeptide domains are selected from the group consisting of consisting of an A domain, EGF domain, EF Hand, Cadherin domain, C-type lectin, C2 domain, Annexin, Gla-domain, Trombospondin type 3 domain and zinc finger.

47. The library of claim 42, wherein the monomer domain is an LDL receptor class A domain monomer comprising the following sequence:
CₐX₃₋₁₅C_{b}X₃₋₁₅C_{c}X₆₋₇C_{d}(D,N)X₄CₑX₄₋₆DEX₂₋₈C_{f} (SEQ ID NO:219)
wherein C is cysteine, Xₙ₋ₘ represents between n and m number of independently selected amino acids, and (D,N) indicates that the position can be either D or N; and
wherein Cₐ-C_{c}, C_{b}-Cₑ and C_{d}-C_{f} form disulfide bonds.

48. The library of claim 47, wherein the monomer domain is an LDL receptor class A domain monomer comprising the following sequence:
CₐX₆₋₇C_{b}X₄₋₅C_{c}X₆C_{d}X₅CₑX₈₋₁₀C_{f} (SEQ ID NOS:220-231)
wherein X is defined as follows:

[chemical structure]

[chemical structure]

[chemical structure]

49. The library of claim 42, wherein the monomer domain is an EGF domain monomer comprising the following sequence:
CₐX₃₋₁₄C_{b}X₃₋₇C_{c}X₄₋₁₆C_{d}X₁₋₂CₑX₈₋₂₃C_{f} (SEQ ID NO:232)
wherein C is cysteine, Xₙ₋ₘ represents between n and m number of independently selected amino acids; and
wherein Cₐ-C_{c}, C_{b}-Cₑ and C_{d}-C_{f} form disulfide bonds.

50. The library of claim 49, wherein the monomer domain is an EGF domain monomer comprising the following sequence:
CₐX₄₋₆C_{b}X₃₋₅C_{c}X₈₋₉C_{d}X₁CₑX₈₋₁₂C_{f} (SEQ ID NOS:233-322)
wherein X is defined as follows:

[chemical structure]

[chemical structure]

[chemical structure]

51. The library of claim 42, wherein the monomer domains are linked by a polypeptide linker.

52. The library of claim 51, wherein the linker is between 1-20 amino acid residues.

53. The library of claim 51, wherein the polypeptide linker is naturally associated with the monomer domain.

54. The library of claim 42, wherein the monomer domains form a secondary structure by the formation of disulfide bonds.

55. The library of claim 54, wherein the multimers comprise an A domain connected to a monomer domain by a polypeptide linker.

56. The library of claim 55, wherein the linker comprises the following sequence, A₁A₂A₃A₄A₅A₆ (SEQ ID NO:352), wherein
A1 is selected from the amino acids A, P, T, Q, E and K;
A2 and A3 are any amino acid except C, F, Y, W, or M;
A4 is selected from the amino acids S, G and R;
A5 is selected from the amino acids H, P, and R
A6 is the amino acid, T.

57. A polypeptide comprising at least two monomer domains separated by a heterologous linker, wherein each monomer domain specifically binds to a target molecule and each monomer domain binds an ion.

58. The polypeptide of claim 57, wherein the ion is selected from calcium and zinc.

59. The polypeptide of claim 57, wherein the monomer domain is an LDL receptor class A domain monomer comprising the following sequence:
CₐX₃₋₁₅C_{b}X₃₋₁₅C_{c}X₆₋₇C_{d}(D,N)X₄CₑX₄₋₆DEX₂₋₈C_{f} (SEQ ID NO :219)
wherein C is cysteine, Xₙ₋ₘ represents between n and m number of independently selected amino acids, and (D,N) indicates that the position can be either D or N; and
wherein Cₐ-C_{c}, C_{b}-Cₑ and C_{d}-C_{f} form disulfide bonds.

60. The polypeptide of claim 59, wherein the monomer domain is an LDL receptor class A domain monomer comprising the following sequence:
CₐX₆₋₇C_{b}X₄₋₅C_{c}X₆C_{d}X₅CₑX₈₋₁₀C_{f} (SEQ ID NOS:220-231)
wherein X is defined as follows:

[chemical structure]

[chemical structure]

[chemical structure]

61. The polypeptide of claim 57, wherein the monomer domain is an EGF domain monomer comprising the following sequence:
CₐX₃₋₁₄C_{b}X₃₋₇C_{c}X₄₋₁₆C_{d}X₁₋₂CₑX₈₋₂₃C_{f} (SEQ ID NO:232)
wherein C is cysteine, Xₙ₋ₘ represents between n and m number of independently selected amino acids; and
wherein Cₐ-C_{c}, C_{b}-Cₑ and C_{d}-C_{f} form disulfide bonds.

62. The polypeptide of claim 61, wherein the monomer domain is an EGF domain monomer comprising the following sequence:
CₐX₄₋₆C_{b}X₃₋₅C_{c}X₈₋₉C_{d}X₁CₑX₈₋₁₂C_{f} (SEQ ID NOS:233-322)
wherein X is defined as follows:

[chemical structure]

[chemical structure]

[chemical structure]

63. The polypeptide of claim 57, wherein each monomer domain is a non-naturally occurring protein monomer domain.

64. The polypeptide of claim 57, wherein the polypeptide comprises a first monomer domain that binds a first target molecule and a second monomer domain that binds a second target molecule.

65. The polypeptide of claim 57, wherein the polypeptide comprises two monomer domains, each monomer domain having a binding specificity for a different site on a first target molecule.

66. The polypeptide of claim 57, wherein the monomer domains are between 25 and 500 amino acids.

67. The polypeptide of claim 57, wherein the polypeptide comprises at least three monomer domains.

68. The polypeptide of claim 57, wherein the polypeptide comprises four monomer domains.

69. The polypeptide of claim 57, comprising polypeptide has an improved avidity for a target molecule compared to the avidity of a monomer domain alone.

70. The polypeptide of claim 69, wherein the avidity of the polypeptide is at least two times the avidity of a monomer domain alone.

71. The polypeptide of claim 57, wherein the monomer domain is selected from the group consisting of an A domain, EGF domain, EF Hand, Cadherin domain, C-type lectin, C2 domain, Annexin, Gla-domain, Trombospondin type 3 domain and zinc finger.

72. The polypeptide of claim 57, wherein the target molecule is selected from the group consisting of a viral antigen, a bacterial antigen, a fungal antigen, an enzyme, a cell surface protein, an enzyme inhibitor, a reporter molecule, and a receptor.

73. The polypeptide of claim 74, wherein the domains form a secondary structure by the formation of disulfide bonds.

74. The polypeptide of claim 57, wherein the monomer domains are linked by a polypeptide linker.

75. The polypeptide of claim 74, wherein the polypeptide linker is a naturally-occurring linker associated with the monomer domain.

76. The polypeptide of claim 74, wherein the linker is between 1-20 amino acids.

77. The polypeptide of claim 74, wherein the linker comprises the following sequence, A₁A₂A₃A₄A₅A₆ (SEQ ID NO:352), wherein
A₁ is selected from the amino acids A, P, T, Q, E and K;
A₂ and A₃ are any amino acid except C, F, Y, W, or M;
A4 is selected from the amino acids S, G and R;
A₅ is selected from the amino acids H, P, and R
A₆ is the amino acid, T.

78. A method for identifying a human chimeric monomer domain that binds to a target molecule, said method comprising:
providing a sequence alignment of at least two naturally occurring human monomer domains from the same family of monomer domains;
identifying amino acid residues in corresponding positions in the human monomer domain sequences that differ between the human monomer domains;
generating a library of human chimeric monomer domains, wherein each human chimeric monomer domain sequence consists of amino acid residues that correspond in type and position to residues from two or more naturally occurring human monomer domains from the same family of monomer domains;
screening the library of human chimeric monomer domains for binding to a target molecule; and
identifying a human chimeric monomer domain that binds to a target molecule.

79. The method of claim 78 wherein the naturally occurring human monomer domains are LDL receptor A-domain monomers.

80. The method of claim 78 wherein the naturally occurring human monomer domains are EGF-like domain monomers.

81. The method of claim 78 wherein the screening of the library is carried out using a two-hybrid screening method.

82. A method of producing a polypeptide comprising the multimer identified in claim 78.

83. The method of claim 83, wherein the polypeptide is produced by recombinant gene expression.

84. A non-naturally-occurring polypeptide comprising an LDL receptor class A domain monomer, wherein the monomer comprises the following sequence:
CₐX₃₋₁₅C_{b}X₃₋₁₅C_{c}X₆₋₇C_{d}(D,N)X₄CₑX₄₋₆DEX₂₋₈C_{f} (SEQ ID NO:219)
wherein C is cysteine, Xₙ₋ₘ represents between n and m number of independently selected amino acids, and (D,N) indicates that the position can be either D or N; and
wherein Cₐ-C_{c}, C_{b}-Cₑ and C_{d}-C_{f} form disulfide bonds.

85. The polypeptide of claim 84, wherein the monomer domain is an LDL receptor class A domain monomer comprising the following sequence:
CₐX₆₋₇C_{b}X₄₋₅C_{c}X₆C_{d}X₅CₑX₈₋₁₀C_{f} (SEQ ID NOS:220-231)
wherein X is defined as follows:

[chemical structure]

[chemical structure]

[chemical structure]

86. The polypeptide of claim 84, wherein the polypeptide is 65 or fewer amino acids long.

87. The polypeptide of claim 84, wherein the monomer is fused to a heterologous amino acid sequence.

88. The polypeptide of claim 84, wherein the monomer binds to a target molecule.

89. The polypeptide of claim 87, wherein the heterologous amino acid sequence is selected from an affinity peptide, a heterologous LDL receptor class A domain, a heterologous EGF domain, a purification tag, an enzyme, and a reporter protein.

90. A non-naturally-occurring polypeptide comprising an EGF domain monomer, wherein the EGF domain monomer comprises the following sequence:
CₐX₃₋₁₄C_{b}X₃₋₇C_{c}X₄₋₁₆C_{d}X₁₋₂CₑX₈₋₂₃C_{f} (SEQ ID NO:232)
wherein C is cysteine, Xₙ₋ₘ represents between n and m number of independently selected amino acids; and
wherein Cₐ-C_{c}, C_{b}-Cₑ and C_{d}-C_{f} form disulfide bonds.

91. The polypeptide of claim 90, wherein the monomer domain is an EGF domain monomer comprising the following sequence:
CₐX₄₋₆C_{b}X₃₋₅C_{c}X₈₋₉C_{d}X₁CₑX₈₋₁₂C_{f} (SEQ ID NOS:233-322)
wherein X is defined as follows:

[chemical structure]

[chemical structure]

[chemical structure]

92. The polypeptide of claim 90, wherein the EGF domain monomer is fused to a heterologous amino acid sequence.

93. The polypeptide of claim 90, wherein the monomer binds to a target molecule.

94. The polypeptide of claim 90, wherein the polypeptide is 45 or fewer amino acids long.

95. The polypeptide of claim 92, wherein the heterologous amino acid sequence is selected from an affinity peptide), a heterologous LDL receptor class A domain, a heterologous EGF domain, a purification tag, an enzyme, and a reporter protein.

96. A non-naturally-occurring polypeptide comprising an amino acid sequence in which:
at least 10% of the amino acids in the sequence are cysteine; and
the amino acid sequence is at least 50 amino acids long; and/or
at least 25% of the amino acids are non-naturally-occurring amino acids.

97. The polypeptide of claim 96, wherein the amino acid sequence is a non-naturally occurring A domain.
